United States Patent Application Publication US 2013/0096032 A1 - sequence listing, part 20

SEQ ID NO: 635 - DNA, 83371 bp, Arabidopsis thaliana
tgcaataaagaaagacaattagttgtaagttgaaactaaacctacatgttgtctcacctactacaatccgatttgtttcgaatgttcaaagatagactaaaaaaaaaaaaatcctaatctacatgaatcgacaatcgatctccgaggatcgtgttaataagccaaaacgaaagaaagaagaataatttgtttgttgggttggcaattattttaatacagattaagaaatagcaagagatttacatttccatgatttaagtgtgtgatcgttttctatcattgtttagtgcgttataattgatgataccaaatgaaaataagaaaaaaatcgtagacgagttgcttgactcccaacttaaatctccaatatgtttactctgacaagtgacaacaaaccttcaacaacgaaacaacctagaaaacatatctgaccttattcaactacgtgacgatagagccacagaactgaccatttcgattaaaaaaaaaagtaatgatgtggttgtaaatttagtaagaggaacttgatgtgagactagtatcaacaccattcaagtgaagcctcgacaaaactttgtcgtttcatcaaactcagcaaagaagcaaatgaaagcctaatgcaggcccaagaagcccacaactcaagtttggaagcaacggtcttctgagacaaagacagaaactccagaagcttcaccaagtcacgacaagaacagagctggcacaacttcacctaatgcttgtacggaaaaggcattcaacatcaagttggagaatcgggagtgcctgttttccaacgctacgagattatgctgaaaacaaatttaacccttgctctcttaagtgtgtctttctaggctacaatgaaaaatacaagggttatagatgcttgtatccacctacaggaagactctacatcagtagacatgttatctttgatgaatctgtataccccttctctcacacttacaagcatcttcacccgcagcctagaactcctctacttgcagcctggttgcggagctctgactctcctgctccttcaacctcaacatctccttcttcaaggtcccctctcttcacgagcgctgactttccacctctaccacagagaaagacacccctactccccactttagtgcctatctcaagtgtctctcatgcatccaatatcacaactcagcaaagtccagactttgattctgagcgtacgacagactttgattctgcttctattggcgacagctctcattcttcacaagcaggcagtgactctgaagagaccatacaacaagcttcagttaatgttcatcaaactcctgcttcaaccaatgttcatccaatggtgactagagctaaagtaggtatttcaaaaccaaatccacgctatgtctttctgtcccataaagtctcttatcctgaaccgaaaacagtaacagcggctttgaaacatccaggatggaccggtgccatgacagaagagattggaaactgttcagaaacacaaacttggtctcttgttccatacaagtcagatatgcatgttcttggaagcaaatgggtctttcgaaccaaactccatgccgatggcaccttaaacaagctcaaggctcgaatagtggcaaaaggatttctccaagaagaaggaatcgattatctcgagacctatagtccagtagttcgcacacctactgtgaggctagttctgcacttagcaacagctctaaattgggacattaagcagatggatgtgaagaacgcattcctgcatggagatctcaaggaaactgtttacatgactcagccagctggttttgttgaccctagcaaaccgggatcatgtctgcttgcttcacaaatcaatatatggtctcaagcagtccccacgagcttggtttgacaagtttagtacctttctgctggaatttggctttttctgcaggaagtctgatccatctctgttcatatacgctcacaacaacaacctgattctacttctcctgtatgttgatgacatggtgatcacttggtaacagctcacagaccctaacaagccttcttgcagcactcaacaaagagttcagaatgactgacatgggccagcattcacttacttttttgggaatccaggttcaaagacaacaaaatggcttgttcatgtctcagcagaaatatgctgaggacctcctgattgcagcgtctatggaacactgcactcctctgccaactcctcttcctgttcaacttgacagagtgccacatcaagaagaactcttcagtgatccgacttacttcaggagtattgcaggaaagctccagtatctcacattgacaagacctgatatacagttcgcagtcaactttgtgtgccaaaagatgcaccagccaactatatcagactttcatcttctcaagcggattctcagatacattaaaggcaccattacaatgggaatctcctacagtcgtgactctcctactctcttgcaggcttacagtgacagcgattggggaaactgtaagcaaacgcgaagatcagttggtggtctatgtacattcatgggcacaaatcttgtctcatggtcctcaaagaagcatccgactgtatcacgcagctcaactgaagcagaatacaaatccttgagtgatgccgcatcagaaattctttggctaagcacacttctccgcgagcttagaatacctcttcccgacacaccggagctgttctgtgacaatttgtctgccgtttatctcactgctaatccggcattccatgccagaacaaagcactttgacattgattttcattttgtcagggaacgagtggctctgaaagctttggtggtgaaacatattcctggctctgagcaaattgcagatatcttcacgaagtcacttccttatgaagcgttcatacatttgcgaggcaaactcggtgttactcttccgcccacaccaagtttgagggggactatcaacaccattcaagtgaagcctcgacaaaactttgtcgtttcatcaaactcagcaaagaagcaaataaaagcccaatgcaggcccaagaagcccacaactcaagtttggaagcaacggtcttctgagacaaagacagaaactccagaagcttcaccaagtcacgacaagaacagagctggcacaacttcacctaatgcttgtacggaaaaggcattcaacatcaagttggagaatcggtttttgacccttgattcagagatcccagcttgatgtctgccatctgtcttgtcttcctagggttttagcaagtctcagacattgtatataaacaagtttatcatgtcttgtaaccttttaagctttatcaataaaaacagagtattgattttgccttcatggtatcagaactcatggaacatagatccatggaactttactctgttccttctttaaatatctcaaactgtgtcactgttactctcacgggaaagaactacattctctggaaatctcagttcgagtctttccttaatggtcagggacttctgggttttgtcaccggctccatcccagctccaaaccaaaccaatgtggtctcagacattgatgggtcaacctctgcttcaccaaatccggagtactaaacctggttcaagacagaccgagtcgtcaaatcttggcttcttggatccttttccgaggatatcctcagtgtggttgtcaactgcaacacttcacatgaggtatggatctctatagcgaaccattttaatagagtctcctcttctaggctgtttgaactgcaaagacgcttacagaatgttagtaaaagggataagaccatggatgcatatctcaacgatctcaagaacatttgtgaccaactagcatctgtaggtagtccagtgacagaaaagatgaaaatttttgctgcattgaatgggttaggtcgtgagtatgagccaatcaaaaccaccattgagaactctatggatactcagcctggtccaagtctagaaaatgtcattcctaagctgactggttatgatgataggctccaaggatatcttgaggaaacaaccatttctccttatgttgctttcaacatcaccacatctgatgatagctatcgcaactcctacaaccgtggcaagggtaagcccaatagaggcagaagctccttcagcactcgtggtagagggttccatcagcagatatcctccacaaccagttcttcaagctcacagcctggtggttcttctgttatctgtaaaatctgtggcaaaatgagtcattctgcactcaagtgttggcatcgattcaacaacagctagcaatatgaagacctccctcttgctctggctacaatgcgaattacagatgtcacagaccaacacgggaatgaatggcttccggactcagcagcaactgctcatgtcaccaatagtcctcggtctctgcagcagtctcagccttatcacgggacagatgcaatcatggttgatgatggcaattatctgccaatcactcacactggatccacaaacttggcttcctcatcaggtacagttcctcttactgatgttcttgtttgtccaagtataacaaaatctctcttatctatgtcaaagctcacacaagattttccatgtactgttgagtttgaatatgatggtgtgcgtgtgaatgataaggcaaccaagaagcttctcttaatgggaagcaatcgtgatggtttgtattgtctgaaggatgacaagcagttccaggccttcttctccactcgtcaacgctcagctagtgatgaagtgtggcacagacgtcttgggcatccacatcctcagatccttcagtaacaggtgcagaatcactctatatctatcaataagactactaagtctctttgtgaagcatgtcaactcgggaagagtactagactgccatttatttcttcttcttttactgcaagtagacctcttgagagggttcactgtgacttgtggggacccactacaataacctctgtacaaggctttcgctattatgcagtgtttattgatcattactctcgtttcagttggatttatcctttaaagctcaagtcagacttctacaatatctttcttgcttttcacaagctagtcgaaaatcaacttagtcaaaagattagtgtttttcaatgcgatggtggtggagagtttgtcagtcataaatttctgcaacatctccagagtcatgggattcaacaacagctctcatgtcctcacacccctcagcagaatggtctagcagaaaggaagcacagacatttggttgagttaggtctttctatgctgtttcaaagtcatgttcctcacaagttttgggttgaagcctttttcacagcaaacttcttgatcaatctattgcctacctctgctcttaaggaatcgatctcaccttatgaaaaactctatgacaagaagcctgactacacttctttaagatcatttgggagtgcctgttttccaacgctacgagattatgctgaaaacaaatttaacccttgctctcttaagtgtgtctttctaggctacaatgaaaaatacaagggttatagatgcttgtatccacctacaggaagactctacatcagtagacatgttatctttgatgaatctgtataccccttctctcacacttacaagcatcttcacccgcagcctagaactcctctacttgcagcctggttgcggagctctgactctcctgctccttcaacctcaacatctccttcttcaaggtcccctctcttcacgagcgctgactttccacctctaccacagagaaagacacccctactccccactttagtgcctatctcaagtgtctctcatgcatccaatatcacaactcagcaaagtccagactttgattctgagcgtacgacagactttgattctgcttctattggcgacagctctcattcttcacaagcaggcagtgactctgaagagaccatacaacaagcttcagttaatgttcatcaaactcatgcttcaaccaatgttcatccaatggtgactagagctaaagtaggtatttcaaaaccaaatccacgctatgtctttctgtcccataaagtctcttatcctgaaccgaaaacagtaacagcggctttgaaacatccaggatggaccggtgccatgacagaagagattggaaactgttcagaaacacaaacttggtctcttgttccatacaagtcagatatgcatgttcttggaagcaaatgggtctttcgaaccaaactccatgccgatggcaccttaaacaagctcaaggctcgaatagtggcaaaaggatttctccaagaagaaggaatcgattatctcgagacctatagtccagtagttcgcacacctactgtgaggctagttctgcacttagcaacagctctaaattgggacattaagcagatggatgtgaagaacgcattcctgcatggagatctcaaggaaactgtttacatgactcagccagctggttttgttgaccctagcaaaccggatcatgtctgcttgcttcacaaatcaatatatggtctcaagcagtccccacgagcttggtttgacaagtttagtacctttctgctggaatttggctttttctgcagtaagtctgatccatctctgttcatatacgctcacaacaacaacctgattctacttctcctgtatgttgatgacatggtgatcactggtaacagctcacagaccctaacaagccttcttgcagcactcaacaaagagttcagaatgactgacatgggccagcttcactactttttgggaatccaggttcaaagacaacaaaatggcttgttcatgtctcagcagaaatatgctgaggacctcctgattgcagcgtctatggaacactgcactcctctgccaactcctcttcctgttcaacttgacagagtgccacatcaagaagaactcttcagtgatccgacttacttcaggagtattgcaggaaagctccagtatctcacattgacaagacctgatatacagttcgcagtcaactttgtgtgccaaaagatgcaccagccaactatatcagactttcatcttctcaagcggattctcagatacattaaaggcaccattacaatgggaatctcctacagtcgtgactctcctactctcttgcaggcttacagtgacagcgattggggaaactgtaagcaaacgcgaagatcagttggtggtctatgtacattcatgggcacaaatcttgtctcatggtcctcaaagaagcatccgactgtatcacgcagctcaactgaagcagaatacaaatccttgagtgatgccgcatcagaaattctttggctaagcacacttctccgcgagcttagaatacctcttcccgacacaccggagctgttctgtgacaatttgtctgccgtttatctcactgctaatccggcattccatgccagaacaaagcactttgacattgattttcattttgtcagggaacgagtggctctgaaagctttggtggtgaaacatattcctggctctgagcaaattgcagatatcttcacgaagtcacttccttatgaagcgttcatacatttgcgaggcaaactcggtgttactctttcgcccacaccaagtttgagggggactatcaacaccattcaagtgaagcctcgacaaaactttgtcgtttcatcaaactcagcaaagaagcaaatgaaagcccaatgcaggcccaagaagcccacaactcaagtttggaagcaacggtcttctgcgataaagacagaaactccagaagtttcaccaagttacgacaagaacagagctggcacaacttcacctaatgcttgtacggaaaaggcattcaacatcaagttggagaatcggtttttgacccttgattcagagatcccagcttgatgtctgccacctgtcttgtcttcctagggttttagcaagtctcagacattatatataaacaagtttatcatgtcttgtaaccttttaagctttatcaatgaaaacagagtattgattttgccttcaactagaaccgccatcaaaggcggaggtaaaatatcatagtaaatcactttgtggtattttgaataatacattatctaaaattcattcccttcattttaatacacaaaattctgtttttataaagtttgacacaatcgcgaaataccgtaccgtattgtccgtaacatatgttgaaaaaacattgtttttcatattccattgaaaattatattcagaaaatgtaaaaaaaaacaatttttgtatttcgaaaattaaagagacttaaaacaaatgtaaccagtatagaactgtacttaccattaagattccatggcgtgaggagaatatccattgaactacaactccacttttgctagcggaaatggatgaaaggatcactaatataggactccattgttatacatcatgcaaccacgacttttgaaggtttgatttagtaaactaaaaacaagtaaaaaagaaaggctccactttgatggttggaccttgtgcattggtattttaagttccactggaattttatttatttatttatggttaagtcttcttttttatcaaactctttcgtacatattgatcacactgttttccacttgtatgaaaaaataatggtgaaaaaagggaaaatgattatttgagtaagttaaagtttaccctgacaacatgtaaactctttctttactcaagggtgaacgttgaaaatttccatgttgatcaccgtgtcatgaattttgggcatactcttggcaacaagttcttgactatctaataattgtttatgaaatttcttgattattcactccaaaaaatatatcggccacaggaagcgattttcgcaaccttgccgcaccttagatggccaaaggcatgtattataatgacatgtatgaacatatcccgagattttgccatctatattatgtcttccacacacaaaggtgtcattctcatttctctgtttctaatctggactggatgatctcaaagatgtctaaaagaattgaattagagaagctagatagtgtaaataaagtatgcctgaatttttgaggtctttgctaatgtgtagatataacaacaattcattatacaaattccatttggagtatgagaaggagcaaaaagcaagcaaaaatgtgtttgtacctaagacctattcagcctgcagtgagaaacgacaaggagctaagcaagcgtcttggatgacctaattggctaatggatgactggatactcatcccgaagaaaatcagtttttaaaaataggaaacttttactttctctaagatatattccttattaccagattcagtggctgttttctcatttaggagcaaagcaatgttataggatgtaagaaaatttacaataattccataagaacacaaaaacagaaacaaaaaaaaacaaaaaaacaaaaacgaacgggagtatgtctgcaaccagaatacaaagccaaacaggatgtataaaaaattgaagtacttcatgtcagctgacctttcacagttgcacttgaagcacgcagaagaatcaacagattttgtgtgtttagtggttgaagaatctgatcacaccgaggtagtatataaggccagtttttggaaagaagaagaaaaaaacttttcaaatcacattcttgtctgcagttgccacttcattgtgtatttgtccctggaaaacaccacatgtcagttctgttcataagaaaccaaagccatcccaaacaaccttccataaagagaatccaaattgggtaagtaatataaataaacaggttaaaccatttgtttcataggtaaaaaaaaaatgtaactaattctcacttttaatgtcgcaaggttggaggtcccattctttttttttttggaagaaaatttggaggtcccattctggatcatcttttaccctagagtcctagacatgtattcccacgccatttgttcgttgatcataccagtattgccggggacaaagggtaagttctttaaactttcacaagattcgacttctaagtgttccagggattcgagcaccactctgtcgttgcataagctccttaattgtggaagatatttgagttttatgacagttagcttaggtagcaaagactcagcacaaaaatcaactggcactgaagaaaaattgaagagctcctccaacctcaaacatgagacaacctttatctcttgtaggtttggcagagtacctgctaagatttggtctgagaaaagacgtttaagctgtcggcagccagagacttgaagtagttttagtttctgaagtctcatcccgaggaaaccattaagttctccgatgctttccagattgacattgtccaaagaaagttcctcgagatttggaaagagatccagttgggactcacaaccactcgcaaggcttaagctgggaaaatagtgaatggacagtgctttcatggcaacaaagctacttttgctcttcgttaccaagttctcgaacataccattaagaccctcacaatagttcaagtctagtgatgtcacatgttgcagtagccacccaatagatgcatttgagacattgacatcactgattgctaggcaaccttcaccggtgccaggaggtgaaaccgatcgaataggtgaaaatagaaactggaactttgttagccttttggtcaaagaatcaaattcataggaaaaggacaagacatcgaggagcttaatggcaagaaactgcaaatgagggaggcatgtaacctcgtcaagtgttgcttgtccttctctttcttctcccttgatgccccaactataagcactccccgccatgtctagaacctccaaacttgataactggagaatagttccagccggaatgctctggagttgatatgtgttggaaacgcaaatgtatcttaagctgctcaacgcttcaagacctctcggaagttccctaatggcagattcatgtagatcaagaaattggagtttaacaagggattctagcgaaggcaggttcctcaattttttacagtttcttaacacaagagaccgcaaactatgaagatttgaaaaggagtctggcaatgttcttatacgaacaccactgagatccaagattctaaggtttgggaatgcttgtaagaacccattaggaacttccttaacatgggaattcccttgtagtagtaaaactaatgtttccacaccctctatcacattattaggtagtctttctagcttattagccatcaaagaaactctctggactgaagaaacaaacttatcttgtggaaactctattagacctctcccggccatgacaagagaatgaaatccttcaccctgagaagacatgaaccatatagcaaagtcacgcacaacatcgtgcattttaactgtatcacaactatcaccatcttctaacaggcaagagtccttcaatctctcaaccaaagtaactccctcattcatcatgtcctcgtaatgatgttgtccatccaacaatccttccgcgacccagtacattattagttcacttactttgatagagtagtcctccggaaataaagcacagaaaaggaagcaacttttcatattgtcttgaagaaagtcgtagctgagttttaaagtaccaaagatcttttcttcagtatcgatagaaggtgctgatctctttagcaaattcaaggtgtgtttccatacctcgacttgaggttttccgcgcagggtccgcccgattgtgatgatagccaaaggcaatccacaacattcatgggatacatcctttgcaatgggcttaacattatcagagtttgctacttctccaacgttgtggcaaaacaattcccaagcttctttctcttgtaagcatgcaactttgatgttttcattagtcatcatctgttggcacacttctagtcttcttgaagttagaacaacctttgaatccttcgatcgttccaatgctaatggaatacccaattggtccaaatcaatggggtgccaaacatcgtcaagaataaggaggaaatttttcaaatctattagcctctcacaaatagttaagcctagctgattcatttgctcccttgtaaatcgcttgcccagtctcttggctatgtccatctggaccctttttaagtcaaaatctttcgacactgtcacccaaattaccaaagcaaactgttgagtagcagcatatttcaagagatcattgttaagcgtcctgacaagtgttgtcttcccaacaccgcccataccccaaacaccaatcttttgaacattcttcttcttcaaacaatcctttagcttatccaacatctccagtgctgttttttgaggatgaaatgaaggccccaagacccgttcaactatttctctagatgacttgttgactgaaatcttttttatgagatcttggccttgctcctccagccttttgactttctcaagaatttccacatctttgtcgctcagccatatagcacatgaagagcgtttctccaaaatcagctcaccaagaggcacattctcttcgacctttcttagccatatcctcagctttcgctccaaagatttctcttggatccctgatctcttaagagcttcattcaccttggtctgcacattctttagtctctccaatgctctattcaacgctcttgcgttcgatctgaacatgactctatgggctctcgaacacatgccaaagattatttcatagccattcaggaaccaataagtttacatgcgagaaaaggctattacgagatccatgactgctaagtagatcatttccatgccatgacgcatcaaactggcattcagagatcaaggtagggggggtcttggttaaaacctggaggggtaacagagtctatggactaatcttctttaggataacagagtctatagccaatgactttcatcaacaatctactaaatttcgttttattgacatttgcgacacaagatatcgccgaaaacgaaattgaaatatacctcatacgagagctctaaaccgaatcgtccctgtctctctctctctctcgcctcgattctctcaatctcgtcacttctccactgtctatgtcgaatcgcttggtggcttgacttttctgtgattatgggtctactgattctttttttctcgagttttcaaccaaaaacaaaacaaaacaaaaagtttaaaaacaagttacatgtgactatgtgtgcagtttcgtgtagcttatcgaaggaatttaaattgactttcaggaacaacaaatgaatcagtgaacaatgctaaagaagtggagtcaagactgaaatagaacaatttcttcatatattcacataaagtgaaacaaaggtaaccttaacaactagtacaaccacacagcttccattgctgcagaggaaaagcaaatgaaaaaaaaaacaatcctaagcattatctgatatcaaccagtttccagctttccctatcttcgtaatgaacctaatcttcttcagtaggcttagatgaaccagccttcttggggagaaggagattgtggatgttaggcatcactcctccattagcaattgtcacatctccaagcaacttgcttagctcctcatcattcctcacagcaagctgaatgtgtcgtggaactatacgggtcttcttgttgtctctcgctgcgttcccagcaagctcaagtacctatagaaagtgagcgcaccaaattcagttcccaagcagacatgttcacatatccaaagacaaaactaagtgaacaacaacatttttcgaatttgagaacacaattgacagtatcaatcagtgccaactatgataactcaaagtagtaaggaacaaatttaaccctaatttcgataagcatgatgagcacaaagaaacacaaattgagctcaaaactacacaaaaaaaatggacaatttttcccaagaaaaaaacaaactaaggaactaatgcattctaaaatattccaaatttcgcataatttaacgaaaggggtaagaaaatctaaaatccagaaccctagatgcaagctataaccatttaattcggtaaaaagagtaaattaaacaggtgataaatagaagagactgattacctcagcggcgaggtattcaagaacggcggcgagatagaccggagctccggcaccaacacgctcggcgtacttaccggctttcaaaaatcgagcgatacgaccaacagggaattgaagcccagccttgctactacgagaagtagacttcttcgctgcaccagatccaagttgttttccccgacccgccatttctctctactacccaagatagaaaaaagatctcttagaggaggatgaagcgtaactgagaaatttctctctgtcaaaaataacaataatgagtatcagcgaaacccgccatgatgattaatatagtggcgagatagaaaatatttctgaccaatgatatgacactgcatggatcgataatctacaccgtcagattgttacaagtttaagggacgtgatttgagattcgtgcgcccacctgctttgtcctttttttggttctccgatgatttcaatggattgttatatgggctatattgggcttgttaaatagaaatactcctttttattttaacgttatctggcccaaaatttaacactgttcggcccaaataaattgtttcttcacttcttgtacatatgtattttcctttttatcaaaatttcaaagaagttagggagaagttataacttactaagtgttgtaatgattattgtttgctttttagacgtattctttatgtgggtttaaatttggataataacagttgcaagttgtatgacatattgtggtggctgaaaagccacaaatcttctcagttagtaagaactcaaaagttgtaatattaatttagacaacgttactttcgttgttatccatctccggagaaaacgttacaatttgtcaaaaaagtattaatgtcaagctaatttctccgaagatggataacaaagaaagtaaacccaatgagagacatttgaaaaaatgagtgacgtgaacgtggtgggatggttatgatgttaacaaaagatcggtggatgtacaatacttgaattgttctttagtgtgtaggatgttgaaatgtctttaatgcttgaaaatcacaacatagtcattattcgtttcatgacctaaaaaaatcattattcgtgttagaaagaaaaggaaaaagtaattggaaatttatgaaaacagacagctttttaggttactgtagaaatgagaatttttaatacaaaatacttgttggtattgacaagtcatacttccaatctttttttttgtttctcgactcgaatgcttgttcgaaggacaaacacatattgtggaggtatcgttgtccgacagtatatgaagatttaaatacaatccaaactgcaaaagcaaaacatattggaagcattagatttgggaaatgtgagattgtacatacttgtatttttagtctgaagacaaccaaatctactgtggcctcgtgaatcaaatagtaccatagatagctaagttacctaagtacaataactattgtcttgacgtatcgaacaacatgaaagaaaaattcataagaagtaaatacgaacaccattcaaattttctttatatccatttcacactatttgttccatccattttacgttaaaccacattgattccgaccttattccacttggtttgttgtactttgcgttgtgctgtccatattcaagacctttcatattaccatcaacccatgtatccaatacatatgaatttaacaatgatgaagaaaactaacattattttgagtctaaaaacacttttgggagtattttcttgttttcatttaaattttcaaattttgtgtatcttcttatcttcagagctctgacgactcaataattatttttcccattctcttcactatctctctccctagaaaattgccagaagaagaaggttctccaattcaaaaaaatagaaactcgctaccattcatttcaaaaaatttcttgttaagttacgtttttttctttttttttgcttctttcgttcttattgtcttagaagacaaaagagactagagaggatagaaaaatggaagcttcaagcacaagaagcgagaagaagaagaagaagaagacgatacagagagaaaacaccgatactcaaaagaaaaaaaagctacccagtgtttggttttcacttaagaaatctctcccctgcaaatctgatgtctccgatgtccacattccgagatccaaaaaagagctagctcccatatccactaagagaacaacaacctcctccggcggcggggtcggcggcaggtccggttgttcaagatccatagccaatcttaaagacgtaatccatggaaaccaacggcatttagagaagccgctttgctctagccctcgttctataggaagcagcgagtttctcaatcccattactcacgatgtaatctttagcaactccacctgcgagctcaagatcaccgccgccggagcaacagaattcgtcgggaatcttagaccagggacgccggtcaattactcttcttcacgccgtagccaaacttcgagaaaggcttcttctttagatagagaaggattagggtttcaccagagcagaagagagaatgatagagaagccgccattaacggagacaattcctctgtttcttgccataaatgcggcgagaaatttagcaaactcgaagctgcagaagctcatcatctaaccaaacacgccggtaaatttcccaaacttcgtctttgaattttaaagttccttactttatagcaaagttcataactttcatcttcgaatttcaaagtttcttactttttagcaaagttgttcccaaagtttgtaaatttcaatttcgaatttcacaattaggttacagagtttcttaatggtaacccaaattttcagtgactgagctaatggaaggagactcgtcgaggagaatagtggagataatctgcagaacaagctggttaaagacagagaatcaaggagggagaatcgatcggattttgaaagtacacaacatgcaaaaaaccttagcgagattcgaagaatacagagatacagtgaagatcagagcaagcaagttacaaaagaaacatccgagatgtatcgccgacggaaacgagcttctcaggtttcacggcaccactgtggcttgcgctttggggataaacgggtcgacgagtctgtgttcgtcggaaaagtgttgcgtttgtcggattatacgaaatgggttctcggcgaaacgggagatgaataacggaattggggtttttactgcgtcgacgagtgagagggcgtttgagtctattgtgattggagatggtggtggtggtgatcggaaggcgttgattgtgtgtcgagtgattgccgggagggttcatcggccggtggagaatgtagaggagatgggtgggttgttgagtgggtttgattcattggctggtaaagttgggttgtacacaaatgttgaggagctctatttgctcaattctcgagctttgcttccttgttttgtgctaatctgcaaaccttaaatcaaacttttgaggttgataagttgtgtcaattagagagtttcgaaaacgcaaatttggtatattgatctcagtcgtaaaaatcttagctttcagaaataaatgtgttgtagcaaagtttctaacaaatgatttaaaagctttttgctatcatttcatttacagtctcttgatgaacagctttttaaataacgaaactatatttttggcttgcatcattgttcaggttttcttgtgacttgagtttaagtttctatttgcatacataaaaagataaaatttgaataacttttggtttggtaaattggcatttctttttgaagccacttgatgtgtgaaagtctctagatattgagaaaagcatttatttacttctttttttggtatgaaattatgaatgttaagtactagcatttatttacctttaacctcaaactcaaaaagtaaagcttttattcatattgttttgagacagatctctaaaagacggaatgtttttgttcatggtgtaataattgataattttggttcatgtgaagtagggaatggtgttgttgcacgaaataaaggaatggaggttgaagagcgtcagatacagaggctttgtttcacgggtggagaatattggtaaatgccaaattccatacaataactggcaagcaaataagtctcaaagtagagaaaaattaatgatcaggtttttaattcccttgttttttgtcaaaagtttttatgcccttttttgctctatcaccttcatcgtgtaagaaactttgtgcatggtaatggactctaacaaatgaaagtggaattggtgaactctaaaaactgaaatcaagttcaaaattgaaaatttggcttacctcaaacatgctactgtcatgcttttgtttcttattaaaacgataagcgaacaagaacagaacatcgtagctagcatattgtttgaaaagcaaaatggtccatacgcattgatacaaagcttgcatcaaaagtgacgacaaaactaagtactattacttacactctgagctagtaggatctatcattttaattgttcagacgtattaagactaaaagtgtatagtgaatacaaacaatttgtttgggattgtagaatgcaatcttgatagaagcatcaatcgttgttgatctcacattctcactgcctgagtttgtggttcaaggtagggaacttaatcttgatagaagcatcaatggtttgatcaacaatttcttcaataccatatttgtactcaaaccccaattctcttaacttctttgaagaaattataggcttcatacattctctctcttcctcgtcttcatttaccctataaatcaagaataataatttttaaaaatctttcatcttaataaaacaaagaagaattgataatgattgtagaacttacttttgaactttacaaagatagtccttagagaagtgatgaagcatcaactcatgcatatcaatattgtcaacacaacatatatattgacctttagcctttggttgttccatcaaaaacagatgagccctgcaaatatcttcaatgtgtactaaagcaatcgaacccattcttttgttcacagctgataatatcgcaaacaactttgagtcacctgttttgttatattgtaagtatcaaactagttaattaagcctaacatttaaacttatgtatgataatggaaaaaattatatacacacctgtaattggagacaagagaacttgaacgcttgatgggacaaatggagtaaggaatggacctgaaacagttgttgtaatgactgaaacaagatccattcctctctctttcgcataccgaaatgcttcttcctctgatacgagcttcgataatacataaatctgtaaacatatgaagttaaccttgttaatgacgcagaacaatgaatttgtaaggcattttaatgaaattatactattgttatagtaattacccatccacttgcttgtgttttaaggacatgatcaacatgagccttgcatgtttcatccacgaaagatctcatccgttcattctcatctttagcagtgagagtgctgatggatgatgtgaagacaactcttttgactgactttgactttagacaagaactaagtacattccgtacgccttttagcgccggttctatgactttgctctggacataactctctgcggttcaatccaacaaaacccggtttttattggttaacttctaataccaacggtttgatccggttgatatcggtttaattaggtgttgtgctcaaaaaaaaaggaccggtgcaacgaaaaggtcgtaccgagattaacgtgatctgatgagatatcaaactccatggaagcggcgacatggaagacgccgtcacaacccttaacggcgtcgtcaaagctgccgtcatctcgaagatccgctcggaataatctgagccgttcattttccttccatttagattgaaagtattcagattttgctgtcgagggaagaagcttgtcgttaattatgaagacttcaaaggcaaatttacaaaacagtccaagttttagccaaaataaccaattaactcatttttatttcaaaggattgtgtaaagtacctaaaagattcgatataaacaaagtttgaaaacaagaaaataccaagatctctgagagtggcatggactgtgtaacctctttggagaagagacttaaccaaccaagaaccgatgtatccacttgcacccgtcacgcaatacgtcgccgttttgctttcctctccttgcaattccatcactccctcttcttcttctcgaaatgccaaatttacagtgtaattttggcttgtaacgataagttattaaattatttgtctgtgctattttaaatattgtgttttgtttgtttcctttgatacggtgtcaatattttcatattttttgacaattggaaaactactagacagacaactttttatctttttgacatattattatatttggtaagctttgatttttggcgatttagtgtaatacaatcatagtgcaacatcattcattaagacgggaagaggaaaaaaaaaacctcgcaatagtcatttccagcggaagggctcagtgttgtgtttgttttgttttgtcttgtccttcttccacatcagatgagaaggctctcacacacatcgtaaatgtgccactttaactaaatgggctatagtctgggcttactgggccggaccataaacccacactttattcaatactttaaacgaatcatgttgtgtgtgacacatcattagccactaaaattttctgaaagttttgttacaacctcaaatattcctaaaagtttatcataccctataatcaatcaaatattaatcttaataaaaccagctcaagatacactgatctttaaataagtcaaatccgatcaatttatactcactttcgtcctgttgtgtgacactttgattcacattgataaccatatacatacatggtacatgtgttatgtgtatacacagtcatacatgcatatatacaacgtaaatgtgcacaatgatgaagtggtgggtgatgtctggtgaatgaaaaggaagaaaagttgggtcttacatacatagacacaaatctctttcatggggacacctagaaaagacccttatcttttatacccactcatacgcacacacaaatccacaatatataaccaccaaacctatagtatattcattcatactaagaatctatgactgcaacacacaccacgattcaacataaagggaatcttatcttcacaaccgaatttagaaaacattcgttttaaaagaaaataaaataaaagtatgtgttctttcttattatcatcatcttcatcttcttcctccaagtgatagcactaagtagacagcccaagagctcttcccaacattccgttggcccacggcaaactctttaaagcttttcccatttatgagtttgatattcaactttaatattagtccataatctaacggcgttgtgttttttgccattgatatttcgaagaagaagcaacaaatattatcgtcatcgattaccatttaattaccaacatatgtttacgtttgattatacaaccatcataagctacaaatatcctcgtcaatacatttgcgatgaatatattacgattcagtgacattgtttgccacctcttttttcttgtgacttcctacgccaagccaaaacccatttaccaaattcctcgttacataattcaatggatgcagtggaatgtgtctaactaaaattctgaacctccccttttatttagtgaacaagcttttccttttaagtataacattaatttaccctatatatgtgtcccagtgcctaaagttattacgatgtacatcactacatctttacaactctaaaattttcactttgtggtcttaattttgttccccaccttctttggtttctaacaaaagtttctctacctttcttcttcatattatattccattcctttttgcaacatattctgtataatttatcctttattattctcaaccataataataaaagggtactaacccaggcaagaaagcaataattttgttcatggaatcatcgaactaacccatccttaaattattttactctcctacactactcttcaccacgtttctagaaagcttctcattaccaaaaccagcaatatcgttttttggtatgatgaactgtcacacttctcagtaggataatctatttgatctcactatatatcaatcatatataaaatgaaccatatatatatagtagtatatgggctctttaattagtggttgttgttttatgttgggccaagatctaatcagcataatttcacgcttatgcgatttcatttatttataaaattgtcttggtatatgtaatgaataaaatttgatcaaatataaaaatataaatgaatgaattagctcatcatgtgtattgtttagtaataagattgtgtcattttctaatgtgggattaaatttatatataaccttgaaaatttgtgatttcagtagataactaattaagtgcatgggatccaacaaaaccctaaatagcctggaactggatcatgcatgagaggaaatcaactaaaagacacgtattatctatttttttctaaggaaaagagttgctagctactatactgttctggttgtggttgtggttgtggtagtggtagtggctgttgttgtggttgtgggtgaagcgtgtgtttgctacgtgcatggacccatcggttatgattattggcggacactatccaataatgggcttaaaagttctaatgatctatgaccccaatttcaccttatccctcttggatattaacttacatgacattttgattacaatgcactttgtttttccgatacatagatacaaatttagagtcttctcctaatatatccttctaatgaatcaaaaccgttaataatggtctcgaaaggtacttgctttaatgatttgaaatgtttagtgaaacgacagtcaaaattgatgacaaatattagaggccagtaaaaaatgattttccaacatttgaaagtacgaaaatgatgtgatacaagctgcgaagataacataaaaagtatgagctataataatataaacaaactttagatgttatattcatagataatcttttatagagtttaattgtgttacctctttatgacccaactttttcaactttaaattatacccatgaatgttaatcctagcctaagcccatgaagcttataactatgggaagtaaagctaattaatcatggctactaaaattatcaaatattaatatatattttaactgtaatgaaatgttgaaaggtgaaaaccgacacactcattttattggttagtagcatgtgatttatgtccatacccatcaattctgttagttgtgtaataaactttgttgtcttaaagtgttcttactcaaatgatatggtcttatttatgatattttaatcaacccttttactctatataaaaaagtctcaagtttgtgtgtctattcttttactagacaaagccatgaacaaataaacatctcaagttgatgagtgattacagtcttattgattgataaattttatttaagaaaaaattactcgaatgttaatcaagcctggtcccatctattcggatattcccacaaaaccatagctagatataaaagttaccagaagagttttttattttatttttatttttataaaaaaatataaaaaagaaccatacatgtcgatgatgcttaaaaatggtctcggttttgaaaaaagaaaagaactgactttgttttcaccttataagtattattcaatcaatcttcagtcaagatattggtatctgcttacaaatctgaataaaatatttgtccaagtctcaagtataggaaggtttgagaaaaccgtaaagtgatataagcaagtatgaggatacgatcggtcgattagattctatggaattcaatatttgattgactcgaccgctttctcatgcgagaaaagaaaacatattaaaagtcgaagagtaataaaaaggaaaagaaactgaattgaccccaaaaaccaatgaattcctttaactcaaatcataaacagctttgcgtttatatattttgaactttttacataggtacataacagggtaatttagagacaaaatcccttaaaacgttgacccaaaaaatcccttaaaacactggtgagtggtgactaatggactcgttgccagcactaatcaatgatttgttgccaccaataagtacaactaaacttaaagagttgaacgcaaccctaccaatactcgcaaatcgcaatcgcatacatatagcagtaagattatagttaaatattgatttcttcagtcacaaaattcatcgccaaaacatcacgttcactgcatgcataacggatgcgttaaataactgatttttgctaattatgcaaattagtatatgtattatgtgacgctaagccattgctatatatattccatctgtttcttggacagttatcactatactgtgtacgaaagtatgcattgaaaagaaatgactatttttcacttcagccaaaacgttcaaactatttactaagtaattcacttcacccaatttatggatatgatgaaaacagtggatagatgatgaagacatacagaccaattatataggatgagaatgcattcattattatacctcttgataagttttctgtttttccaaatgagtaaataaaacttttggagagcaaaagaagaaagaaagaaataatggagtaatgaagacaaacgagagaagacatgaaactcaaattgtcaatgcttcttcaatctcaagagcttttgccctattgtagtgggttactttattagttacctctcaaatagtcaaaagataaggataaacctaaacatctcgatttacttttagatatatgcgatccctataaacattttactttcttctcacacaaacgatctatttcaaaaccaataaatgatgtcatgactcattcacgtcacatcaaataataatgttcgaaaaagtaacttgtttccagaatcttactagacttaatacaaaacaatatgttttgtttaggtatatgacaatttgtcttgttttttgctgattacaaaaaaaaatttgctgattacaaaaaaaaatattgtcggtaaaaaattgtatatgaaattttagcgcaatttttttagattaaacatgtcatatattttattatgagttcaaaatggccacaatataaaattacggtcacaagtcatacgagggttttcggttagtcgagggttgaggcttgccgtcagtatgcttggtaacgtgatggattatgatcgccttcacactcctagtcccaagcagaagcgctggggaacatatagtaatcttggtctttttgctccctccacaaattttacaatgcatcttctgtcaataggtgatcgattcatgcattttcctgcctcccatgtgtgttatttattgactgaacctttataactaaaatttatttagttctgtcacatataatcaagtaatcaactataaatattagttatcaagtatttcttatttgaataagatcaatactaataataaaaagttgatcagatgcaaatataatgggtccattagaccagtctccttataattacaatgcttaagcaaaagaaagtttaaggattattttatatacacatgcacaaatacctctatattggaaatcccatgatttatgtcactaactacgtacagattcgatttgtatcaaaagatgaaaaaatatggagaaaaaaaaaacaaatctccgaagctctttcgtactgtcaaagcgtagccactttatttcatgtggttttcaaaccacttcctaaccagtaaccaatcaactttcactaatgtcgcccatttaatcatttcatccattttgttcttattttagctacaatttgttcagtttaattatactccatttattcgtcatacacgatccttccgtcacgtttcgtacacacattaattcatatataaatatataatatggtgagagtgaaaaaactcacaagaagttgattttatttataatgtgtacacaaactaagtctttgacagcattattacacactgaagaaacaagaagatatatatcttggttttatttttattatcaaagatatatatattagtttaagaacaaataagctaaggctgctaagctatggaccacattattggttcccataattaaatacgtacttgattagatattaataacatgtttataaaaactactaatagtttgctatcaccttaaataaaggcagctactctctatcttgttcccttatactaggccataaagccaacttcaagattcaaccaaacacatgcacgtaacaccatgattttaaattaactaagttcgataaactgtgatttagaaaatattaactcgagtaacagcattagttatttgttttcattatttttcatctatgcaaaatatttatgtgtaaaactaattatatgcatggtttcatttttttcattggatgtgaggaaacagaatgatgtcgaggaaagaatttactaatgggataccaattaataaaacaaaaaggattttacttatatttttcatcacggtgctcgtatttttcatgtagttctgaagaaaagagcatgaccatctcttatgatcaagattcaagattgctcaagatgagtgactaattagatttaatataagatttgaggaagaaaaactaattttgaaaacgttaggaaaaaaaaagaaagaagaagctaaaaaccaccggagatgatattaaaagttaatggtcaaaggacttaaatgactgtcggtgtctcccgccgacgccacaggcttccgtatattattattagcacaacagaaactgtgaaagagtgtggagagtacggaatttttttcttttcagaatatcgaattccaaaaacgtcctttgtcaacgttgaatattacacatctgcatccttagtgcacctgctcacacctgattttcggtggagggaacatccgcgtggcatgttgggataatctgtgtgtatgaactaaattcttaaaataaagagaatttgtaatagatgatgaccacaaaagtttcaatatttttggttagtttggatacagtcagaagaattagaggagtaaaaccaggaactgtcaatattttcaagaatgatcatcaaagattcaaaggttttttctattaaaaagttatgtattgtacaaacagagtatacacaattttgtcattttcctacactattactgcttttaatcaatgataatttacctttttcttctcctccataccacaaaaacctaatgtatggaatttacttaaaccacatttataatgttttccaaatatattattaaaaacaaatgttttccaaatgttgtaaagctaaaagatgtgcgacagttgaaactactgatatcgggaaattaaagtacaaattttctatatcaaacataatatacaaccatagagccattagtcaagcaacttaccaaagtatttgactcgtgaatacaaagaagaaattaagagtcttacgctatgtagacgttacgtacatgttaatctgttaggcaccgattttaaaccatatcagattacagcacacatcagccattagattctacataatctcaattcaattatatgtttaataaacaattacctgaagttttgagaattcggtttctctatatatagaaacaccattcttaggtatacttttctagattaatgttcgtaaacaacataacgaagcatgtccaaaacaaaacactaattagcaaaacaaaaatgctaacccatcatcaaatggctattttcacgattagtaagtttcagttacgttctagacactaaacaatatgaataatattttaatatgacaattatctaattaggctggtgagcttatctagagtttcacgttgaatgtgtttaaatacaaatctagaaaaaaagaaagaaagaagctgaaatatccaaaaatatgcgttcacacccaacaaaatgttcaaatctactcaatttaatttacatggatgatgagaaaagcaattcaaaaaaaaaaaaaaaaatcagttcaaaataaacaacgtgaaggcaccaaactagtagaaataaaataaagatcaacaatccgtacacgtgtcaacctatcaagtttggagtccagctgtctggtccccccaatatacacacacctctaaaaacttattctcgcggagatgacactgatttggccaaaataccgcgagaagttaccaatgaacgccgtttttaagagatggttttcaattttttttgtttagcttaggctattaaaaaggtttaaagttggttgccggtgatttgtgggacaacccgtacgtgattactgcggattaaccggatattgccggtttggtagtgctggtcaaccggattataccccgttataaaatccgtgcccctatcgatcgcattccctgttgttatggacggacacaccccttatttaattatcgtattaagtctgattgagatagttaattacttatattctccatgatttagattactgtttcgaataatttagattatgtagtatggaggaatgatttgcgtattttacactgagtattgcatcaaacattattgtggaattcaaattttaaaccctatgtatttaacttaattaaacattaaatcattatgaaaccaatatatatatattttagtaatatatataagttaattactccttatcatctgacgaccaaatgtctcgaatataatctgttgtcatactcgtaccaactacactgcaattataatggatacttgatgaataataacaattcaacaagtgagatttttttcatttgtaaatgcaaacaaagtaacaaactggtggttcattacaaaatcttcacaattatatatatgcttaagtcagctcaattatatgctaagtctaaaatcttcatagcaattatagtcacatggaattctctattaaagtataagaagaaagaaatggtatgaatgaagaatgatatagttagagaagtcattattattagagtagaccatctttatccatccggtacaggttttgaccaatacggaaagagagaaaaagagtcgcaatccttttttttttgttacgaaattaaaattatataattagtgcaatttaaagcacgaatagtaagcgttcacttaattcctcgattaactgattagcatattacgattatacccttcatcttccttattgtgtctctactctctactttcaccttcctttccttccattctcctctatatatatcgaccctttctctttctttcttcctcacacactaaaagcttgcaaaaaccataagcttatctacttactcatctctctcacaaatcattttctcagacttctctctttctcttaaaccatgcctgaggcaccaaagaaagaatctttagaggttttcgatctgacgcttgaccaaaaaaacaagcaaaagcttcagttgatcgaagaactcacctctaacgccgaccaagtccaaagacaagtcttggaggagatcttgacccgcaatgctgacgtggagtatctcaggcgacacgacctcaacggtcgcactgaccgtgagactttcaaaaacatcatgcccgttatcacctacgaagatattgagcctgagatcaacaggatcgctaatggtgataaatcacctatcctctcttccaaacccatctctgagttcctcacaaggtaaacattctggatactctgtttttgtttgtgttattttgctcgatgctctgtttttttcttacctggttctttcaaaaatatttttcatagttattggttgatcatatagtttgaagatccataagttgtttttgggcgatgagtactctagaaagttgattatttttcttctgggtacccaaaaggttgaaactataataactttctcaaaacttaaagaggctaacaaggttttatatatatgttctgtttggcagctctgggacatctggtggggagaggaagctaatgccaacaatcgaagaggagctagacaggagatcactcctctacagtctcttgatgcctgtgatgagccagttcgttcctggtctcgaaaacggcaaaggaatgtatttcttgttcatcaagtccgaatccaagactccaggaggcctccctgctcgtcctgtcttaaccagttactacaaatcttcccatttcaaagaaagaccctatgatccttacaccaactacacaagccctaacgagaccatcctttgctctgactcttaccagagcatgtactctcagatgctttgtggcttatgtcaacaccaggaggttcttagagtcggcgctgtcttcgcctctggattcatcagagccatcaagtttcttgagaaacactggatcgagttggtccgtgacatcagaaccgggactctaagttccctgatcaccgatccttcagtgcgtgaggcggtcgccaagatccttaaaccgagcccaaagctagctgatttcgtggaatttgagtgcaagaagtcgtcctggcaagggattattactaggctgtggcctaacacaaagtatgtggatgtgattgtgaccgggacaatgtctcaatacattccaactttggactactacagtaatggcttgcctcttgtctgcacaatgtatgcttcctctgagtgttactttggtgtgaatctaaggccactctgcaaaccaagcgaggtctcttacacgctcataccatccatggcttatttcgagttcttgcctgttcatagaaacaacggtgttactaactccatcaaccttcctaaagcactcactgagaaagagcaacaagagcttgttgatctagttgatgtcaagcttggtcaggaatacgagcttgttgtcaccacttacgccggtaagaaaacaaaacttcttgattcatttatagtcaaaagattagaaattttttaagggtctgttctaatgttttgtgtatttgttgcagggctttgcagatacagagttggtgatttattgagagtgactggtttcaagaacaaagcgcctcaattcagtttcatatgtcgcaaaaatgtggtcttgagcatagattccgacaagaccgacgaggttgagcttcagaacgcggtgaagaacgcagtgacacaccttgtcccatttgatgcctcactctctgagtacacgagctatgcagacacaagttccatcccaggccattatgtcctgttttgggagctatgtttggatggaaacacaccgatccctccttcggtcttcgaggactgctgcttagctgtagaagagtcattcaacactgtttatagacaaggaagggttagtgacaagtccataggcccgcttgagatcaagattgttgagccagggacattcgataagctcatggattacgcaatcagcttgggagcatcgattaatcagtataagacgccgagatgcgtgaagtttgctccaattatcgagctattgaactcaagggttgttgatagttacttcagccccaagtgtcctaaatgggttcctggtcacaaacagtgggggagtaactaagatggaatgtggaacgtgaagagactctctttgagctagaaggtttgggacttggacttgcaaatgatgatgtcttctctaatcttaattttagtttaatcttttgttcttttttttttgttatccttttaatatccatagtccctgtgggtttgaaaaccagttgtacaaaaggcaaatcatgttttctccaaccaactctcatcactctttctcgagcctccaaatttttctattgtttaatgcggaattgtttggacttttatcatgtataagcaacgtgaaattgcaatttgctaagatgattttgttaaagaattaagaaattggtaacaacgtaaatgtgacctttactcgttttgggtttgctaaacaaagcaaaagcaaaatcatgtatttttttgttcatggctttactgcctttacataataaatgatacacagacaatttgttttcttataacaaaatcacttacgaaaatgatcagaaggagttaacgtacgtgatagaatgacgcatccacaaagaaataagttcctataattttcttcagatttggtcatcttgaacgttagtaataaagtaaagaaaaaaatcaagtctagataccattgttccctatgtgagcatcaaagacaacaacactggcctggaattattgttacgttgacagacttttttattttaaaatgaatcgtattataaaaaaatgaacggtggttttctttatatgacactgagtcactgacacacatacaattaagccacaattgacatttcattttcatgatcaattttttgatattttcatctacttttttctctaaagttgcatatgtcatactcttttctctttaaacatccctcaaaactttttttttggccctcaaaactttatctttgcggttattgatttctcattttctccggagaaatatagccacatatacgactatccaagcaatattttatcaaccggattggagtgaaacttttctaatcaaaactaggtaaaaagttttatttttttttgttttttgataaaaagtataagggaaatttgaaagaataattaacgaaaatttataaattaataaagtaacacaaaacaaaaaaaacagctatattatatataataatattatatttatccctctctttctaactcactctaagtctttccctctttccactttctctcgtcttttattctttcttctctcaatctcctctctctttcttttttctctttctttagcattttatttgtatctccacgtcacctcactttcctttttctcagaatcttcacacattttgtttttcctaactagtgaaaatgattttttttgtaaaattgttaggctacaaacctacaaaatacaaactctcatcactttcttttaatagattcgcgttgcatccgttaacatataacaaacaaacaagaaggataaagtagattttttagataccacttatgttatctgattgcttaggttgtcaatattgtatcttagagtatagtttttttatacatccaaaatagtatagtacaatattttatttctatacatccaaaatagtacaatatatttttacttataaacactatttactattttataaaatcaaatccgattttaaaaattcaaactatgttgtatgtagaaaaaaatataaatttttatctaataaattttagaattagaatctcttttttggaaacatatatctaataaagatatataacaaaaacatacaaatgggtgaaaactaaacgaggtgttaataaatcatctctcacaaactactccacaccaaaattgtcttttctcaatccttatatgatactttcttaatttatatatatatgatgttatattcttaattaaactttgaattttggttatatacctaattcacccttgatataaatctaagattaaaacaagaaaaaagtatgtgaaaataaaacgaaaacttgttattattaataatggtacacgtacatatagttcatggttgagaagataagacaacaactaatgttttgagatagtgtcctttacaagaagaagaaaaggcaaacgtctgacattttaccgatagagacccatgaaacccaataattttgtacaagtgcagtgtattgtacttatatctaatacttttagaatttaccgttaaatgtttgtaataatgagaaactgtacttgagtactactgcgccactgacgttaaagataaggttgtcttgtcttatatatgtcacaacccactctttcttatgtgtgtgatttgataattagaaacaacgatagttggagatagatttaattgtattttgttaattacataaataatactgtatctctataatttccttatagttacactactttcaaagattctaaatttaacattatgttttttcattttttgtgtttgtgtttgagaaggtaacattcttctatggaaattatgaagaagagagctcaaaatttagtatagtcatttcaacaacaaaaaattagtatagtctataatttgtttatttacatatattttctttaccgaactttaacttatgaatcaacactacgatcttgaccttaatcaaattgtatgcttttatatcccgacataaaaatggatatagggaaaaacaacaatggactcggggaaaataaaactgtagataagttgagacttgagacacgagacccaaaaaacagaaacagacaaaaccaacaaactcgaacagaaccgaccggttcactgctactgtctgtggggactcaaagaccgttttcttcttaacaacccactgagatctcaacaagtgtccacaagcttgcattgacttagacccaccagagtcgaggaacagttgaacacacggtcattcacgtgatactgtcttaaacatagcctagcccttttactattttccaatgtgaaaatgtattttcaagaaggataaagttttttttttttttttttctctcctcaaaacctatttagaagctattttaatgaagttgataagattttaatgttttaatgaagattttacaaaacctaaggtgaaaagacttagacatattcttgaggatgataaaactgagacacatatattcttaatgatatcaggttttgagactcacaacattagaccattggactcgtgtcgtcccataaaatcaacatctacactctctattatgtcaaagtagcatgtctgaagaaagatattttcatcagaatatattttctgtttgctataccgtgttaatcttttattaggtttctcatttctctaatatctatcagttgtctataatgaataagggtaatagaaattttttgatggcgcagacaacaatccggtgtaagtattttgggaggttgcaactggacatatcgctcaaagagacaaagacatggacacgtgtgatgagagttgactttgaccgggtcccttacaaaactcccgcccgtgtggtagacatagctttggtcttctttcgggcttacaaagtgggttgtgtagaccagagatcttggcccatttttactgttgaagtaaaacgacactgtctgacgacttttgcaattctacaatttttcccatctcacgctttgaataatttgtagaagacaaacaaggatttagacgttttggattattcatatgcacttatttaagaaatcaattaagaattttattcgataaatctctaataacgcgtccacaataaatacaataacgtaatgtagatatgttcagtcacatttatctacaagttttttttatctctttgtcaagaagtttccaaggccaagtcacatgctctgcatctgcattctccaatggccaaaaaccatagtcacttatttgacttccactaaacattattctttaatgccgttttttgttttagttttatttttcttttggaaaaaaaataatgccgttttttgtttctctttgagataacaaaaatgatagtatattgtatattgtatataaaaaaagtttgatgatgaaacagtaaacatgcccatgttaatgatttttgttgctacattgggacaatgacatgatatttataatgttatttattaagaatgacaaaactataattaaacaagttcatcatgtattgtttagaactgagacattataatatacatgcatactcgcataatgcgttatgcagtgtttttatgtcttatgcccatcgttttccaaagacaatcatacatatcttctttttctgtcctagttttatcgaaccaatttgttagtccacgaaccaaccacatgaaatttgttaacatattttaatatgcctagttacatgaactgtgatgattatagaaaaaaaagttacgttaaccagtgggatagtagtaatactatggttttatgacactattcaattaactaaccaatactttctaatacatgacccacctgagttttcttgaaccaatgtgttcatttttttgttgacctcaaatcaatgagttcaattgctttacgatactactcatttggactttctattttgtcctaacaaattgatacgtcaatttaagggaataatacttattttccggggcttgcacatgcaacaacttatacccaacatagtgttgtcactctttcaaacaacaatggaattattatgtgagattttattattattaaatccgggacaagtttattttggatttattaatacctttttttagcactatacttgcatggaattttttgaatatattataatatttggccaaattaagcaaccatctttaagtttcaattattttgttttatatgtcttggatttattagaccaaattatatcatctaagtcgcactttaaatcgaacaaaccaatttgatccctcctgttcgactagtctaagttataagacaattttggtcccctccatttctccttatcttatatatatgaccaatccacaaaaattcaatttaatcttttagtctagtaataatgtaatagctaaagttgtttattcctctggagtttggatagttaaaggcataatggttaaattaaaacaggcgttataagtgaaatatatacaatttctttttgttatcactgattttttttctgtgaaattcagattctcatagtgtaaacttttaaacggatagtttagttcttcagtaaattttttctgtgatacttctttgaagccggtccgatttagtccagttctggatatttcaactcggataaatgaatttattgggctaacttttcaagtgatgggccttagtgggccactttaaactaccgtcgaaagagtttagtgggcaacaatgttagtacatgtgactatgtgagtttctctttaacccaagtcagaagtgggacagttacaacttacaaaccaaggcaaagttatgttattgctgtgagctgaagtaactcaatcagtgttgcataattccaaagcaaaaaaaatcacaaaatgccaacaaagaatcaaaatattatcttattgagagagctctaagcagcagcaggtcccttgagcttcttacttatggcggcaatgtacttcccttggtgaaatgcttgccccaactccagttccgttggctgtctcgacccatctccggcaaatgttcccgccccgtacgggcttccacctttcacattttccatctcaaacattccggcaccaaatgtgtagccaatcgggacaaagatcatcccgtgatgaaccagctgagtaatggcagttaatctacacataaatccgttttgtcaacaatatagcaagtggtcactttgatgaatgctgtttggattgtgaaaagaaacttacgcggtggtttcttgaccaccaccttgggaccctgtgctgtagaagattccggctggtttaccggcgagttgctgagtcctccaaaggccgccggtcgcatctaaaaatgccttgaactgagcagccatcataccaaacctcgttgggaagccgaagataaatccatcagcctcagcgagctcgtttggggtgataataggagcatcactctttggtggtgcactcattttagagagcacatcttcttggagcgtttcgggtacctgtcaagaacaaacgctagctcaatacttcttccaatgattctttacaggtaacttatgatcagaaacactgacggcagaaaatagatgcagaataaaggaacatgcccttttgtgtaaataaactaagggaaagcaacactatatacattaaaagtagaggttatggtaaaatatgccaataggatactatagttttgttttggttctgaacacaaaggaaataacttgtagtgactagtcaaaataaaggagctcgagacatcgaatactgtcaagaatgttggcagctacaatgtatagtaaatcaaaattaagagcgtatttcttctttctttcagggagtagagagtcaaacaaacattcgtcttagcaaaataaactcagtgaagcacacattgttcaacgcagataagacaataggatacgccgaaaagacaatgcaggttaagataaatgtctctcattggttccaaaagttctagcctataataagtagtcatcatccgtcagtagtgttgaatcactaaaatagcataagaatggtggcagctaaaagatattccagtaaaacagaaaactctagaaatgtaattccctatctttcagatacaagaacaagtttttaacttcaacacctaaattttcaaagaaatctagtcacttgaaactgtctctcattgtatcctagaatcagatgtgctgatgaaaattgacaatgagtaagaaagctcaataaagagcagtaaaccaagcactgacctgccagagtatggcttcaacaccatcaacagaagcagcacctttcctaatctcttgagctaatttctccacatgaccatacattgagtagtacctattacactcaccaaattgtcaatggcaccactcactgcatctccacattaaaatccaaacccatcacaaaattaaggcaaagcaacacaaatccatgattctaattacaaatgacaattatattaaaccacagcgaaaatcatcgattcacagtgaacaagtatacaacactgcgactttgagatcagcgacaatgaaatcgagtcatttgagttaatcaaagctgatttttcaatcagtgagatcgatcgatgatcgcgcatttgcaataagtgttcgagcagagaaagaaaacattacgacagaagataattttcacatacactatgtaaactttggtcgccattgaagaagtgcgctcgatcctctgaaagcttttctgatttttgttttcgcagaaaatctagctccaaattgttgttatagctagctcttcgagaatttttagtcaacgacccaaaacttattaatttatatttctgccccttaacttatttttgatccagtaaaccaccttaattgtaaaagcttgactagatagctcctaattaacatatctccttttattcatggaaagattaagcattataatcaacacatcattgatagtgcttaaggatgatgatttttttgtgtgtgctacaaatcgatattgtgatacagtcatcaccagtctagtttatgaatttttttctttattttatatatgttcaacacatctgatcaaagatataaactgaagtgtaaaaatagtatcaagtactatgattaaaagaattatgtgaatggtaacattaatggaaaaattaagaaaaaggtaacaaatgaatcgaattaaataaaagaggaagggatcccaaatctctccagtgtcaatgccggcgcgtgaagccaaactcctcctcaatgacctccgtgacgagacaccgcgacgcttccatcaaatcagggctaagcctaaacatcaacacacaaaactccatctgattcaacgcaccgtcgcagtcaaaatcaccttctttaatcatacaccggacatcttcatcagtcaaatctcctaaacccagaaccgccgcagcgttacgtcggagactctcgaacgtgatgacacctttctctctgtccatcaaaagctcgaagccgttgcatagctctccgatcagaccttcaccgcctaggtttccggccatggtaggaagaaaatcgtggaaattgggttgtgggttttgttgggttggtcttgtgggtgactttggtgacgccattagagcttatgttgtttaaaaatctgaaatttggttctggttaaggaaggtttgtttttttatcgttgttattgatttgaggaggagaatgaggagtgaatgagaatataaaggaagagaaattgggatttctgagaaggaacatccatggaagccagctaagattaatgagggaaggtcccgtgtctgggaaattgcgattaatctctcagattgttggtatgtggtttcttcgaggaaggtcgcttttaggggtaatatcgtcacttcgtaaagggatgtggaaagctcatagtgtgaaaacggcgagagatggagggtaaaatcgtccgtttatattaagaaatagaaagagtaaagtaatggaaatggaggagttgtttgtttgttcctttgtttatttatgggaaatttccaccactttcatcggcaagtgacttgagtttgtttatttgattgattatcgaaaatatgtttctttctttttctttaaagattaaggtcggctcgacttaaaattactctggaattattcaaatactggttttgcctgatcacacagttttttttagtatagattgtagttactatttcgatttttggagatgggtatgtttaatgatatttactactacaaattacttttgtcaaagttcacgaaatgtgtaattagtttaagttttgttataacttgcttcaaaaatatgtttttatctcagttagttttgaaaaattaaatagctgtggaatgcatcaacttatccatgacattcagttttctagactttcgacttagttgtgcccaaaaaaacaaaaaaaaaagactttcgagttatgacttgcatgcaagttgcaacttcaaacaaacgaaatatcaaaggtttgactaacatttactataacttggtatgtgacatttctatgcatggtatttgattaaatcaaatgttggtgtcccttattcaaagacatcgtcagcaaaactaaatgcagcgacataatattctactacttggtctgcccgttctctaattgcatgtctctattttaatttatatataatcaaaccaaaatcttgcttattggataaccattgtcattatttcatgattcatgtactatttaaccgaaaatcgcagttcaataatgcttattcaatgcattaaaaaaaaaaaaagagtcaagttcaaagaacgaacattaaatcatgattcctggctaatgatatctttggtcttactcttgcctcttaatgagcttgtcttcttaatgctgacaaaccattgtgctcttattaaaacctctcataaataaaatttgctattgaaatattaaatctgttgaatcatgtttatctaagatacagataaaaggtatcgtaacatttaaactgtctcagaattgataataacctattttattgtcacaaaattgaaaataattcatcatatatttgaaagtgtacattatcttcttaatccatgcggctcattttttgttttcttagattacgtggaagctttactaacagataaccatgggccggcccacatgctgaatcagcaacactgatcgtggcggattttaactaagtctggtcgagaaagcccgtcgcaacattttagttttatatgagtcggtcaacaaaatgctaagctgtggattgtttttttgttttgaatattcaatggtttctgtctttctgagcttactttctttagattgagaagctccccactaaactttgtttgatgttttctttatatcttagttaaattgcattatttagttccaattgacaagtaactttgcatctccattgaatcattccaccatttgtcctataaaacacgtataaaactacaaatatataatctctaggcacgttgtggttgacattaagagcaaataatatcacgacgcaagatactggacagcaactcattacaattctcttccatgtctctctcatttacacatattaaactatattccatggaacctaacttaaacaattttctctatatttccagtaattaaacaaataaaataactgactatcatcattgtttatataccaacttcgtttccacgctctctggttccacagaaccggccatggaagccactaatgtgcttcatctgcttatcatctctctgttttcgacgattcttttggcacaagcaactgatatcctcatagcaaaccagactctaaaagatggagacaccattgtttcgcaaggtgggagcttcgaggttggttttttctctccaggaggatcaagaaatcgttatctcggaatttggtacaagaaaatctctctccagaccgttgtttgggttgctaacagagactctcctctctacgatctctcaggaaccctaaaagtatctgaaaatgggagcttatgcctcttcaatgaccggaatcacatcatctggtcatcatcatcctcaccatcttcccagaaagccagcctaagaaacccaattgttcagattcttgatacaggtaatttagttgtgagaaactcaggggatgatcaggattacatatggcagagtttagattacccaggagatatgtttcttccaggaatgaaatatggtcttaattttgtaaccggtttaaaccggttcttgacatcttggagagcaatagacgatccatcaactggtaactacacgaataaaatggatccaaacggtgttccgcagtttttcctgaagaaaaactcggttgttgtcttcaggactggtccatggaacggtctaagattcaccggtatgccaaacctaaaacctaaccctatctatcggtatgagtatgtcttcacggaggaagaagtttactacacttacaagcttgaaaacccttcagtgctgacaagaatgcagctgaatccgaatggagctttgcaacgttacacttgggtcgataaccttcaaagttggaacttctatttatcggctatgatggatagttgtgatcaatacacgttgtgtggctcttacggaagctgcaacatcaatgaatctcccgcttgtaggtgtttaaaagggtttgttgctaaaactccacaggcttgggttgcaggggattggtccgaagggtgtgttaggagagtgaaactggattgtggtaaaggagaggacggctttctgaagatttcaaagttgaagttaccagatacaagaacatcgtggtatgataagaacatggatttgaatgaatgcaaaaaggtatgcttgagaaactgtacatgctcggcttattcgcctttcgacattagagatggcggaaaaggatgtattctctggttcggagatttgattgatataagagagtataatgaaaacggacaagatctgtatgtgaggcttgcttcttctgagataggtaaggtttaagacttgtgaaacaataaacattgttttactatagaatgatttataaatcttgaatattcttttttgttccgtttcgatcacagatgagtacaatatccattacgtgaagggaaagataaggatgatactcataatagtattatctactgctctgtttcttttttgtctttgcattggtttgactgtcttcaacatgaaaaaaaagaaacttgcaacaaaaggtaaatgatcattgtagttgaatagctctcagaaattaagtatctcttgtttttctattgtgctctataagtttattaaacccgttgttttattcagaaactttgcagcgcgaatcatcccgtgtttcaagcaggaaacaagaggaagaagatcttgaattaccatttcttgatcttgacacggtctcagaagctacaagtggattctctgctgggaacaaacttggacaaggtggttttggacctgtttataaggtaacaaaaaaaaacttcttgtctaattctcagattgtgtgcaaaaagggtaaaatgttttgttctttgagcagggaacattggcttgtggacaagaagttgctgtaaaaaggctatcaagaacgtcaagacaaggggtagaagaattcaagaacgagatcaagctgattgcaaagcttcaacacagaaatcttgtgaagattcttggatattgtgtggacgaagaagaacgaatgcttatctacgagtatcagccgaataaaagcttggattctttcattttcgataaagaacgacgtagagaacttgattggcctaaacgagtggaaataatcaaagggattgctcgcggaatgctgtatctccatgaagattcaaggcttcgaatcatccaccgagatctcaaagcaagcaatgtgttgcttgattctgatatgaatgcgaaaatatcggattttggattggctagaaccttgggaggagatgaaactgaagcaaacacgaccagagtggttggaacatagtaagattaactctgttttttacttcaatgcagcaagtaaaattttgaattactcaaaaaaaaaaaaaaaaaaactatctttctgcagtggatatatgtcgccggagtatcaaatcgacgggtatttctcattgaaatctgatgtatttagcttcggagttttggtattagagatagtgtcaggaagaagaaaccgcggatttcgtaatgaagaacacaagctgaaccttcttggacacgtaagtacattagcgcagcagaaaaattaacccatcgatcatgttcttctaatcttatctaattactataaattttcaggcttggaggcaattcttagaagataaggcatatgagataatcgatgaagctgtcaatgagtcatgtaccgatatctctgaagtgttaagagtgatacacattggtctgttatgtgtacaacaagatcctaaagacagaccaaacatgtcagtggtggttttgatgttgagtagtgaaatgttgcttcttgatccgaggcagcccgggttctttaacgaacgaaatctcttgttttccgacactgtgtcgattaatctcgagattccttccaataattttcaaaccatgagtgtaatagatcctaggtaaaccctgtaactgatatttgtatattctattgtttgattgtttcttctttggtgacacattacattacattaaccaactgtagttttatatataagcttgatttttctaccgtccctgcaacattgtgatggaaacttcgttttgtgaacgtaagcttaaagatgaagagatatcaggaacgttccggttggtgaaaaaaccgggctgtgtagggtgaggaagagaactatcactcccaaacatcaagacaacagaagccatggttggtctgtcttctggtttttgttgaacacaaagcaaagcaacatgaatacatcttagtacctctgggataacacttgtctcttccaaccactcttcctctggtacttctatttctctgtcttcaacccacattttccacacctaatatagtgaaaaggagacaagtttcaagatggccggttttgtttgggatcccacaatattgtaaaagacctaatttagtgtataaatggcatgaatcaactcctaattagtgctcgttgattttgacatagagattaattccatgaattttcaccaatcctaaaatgagatttgatttttgaaaagtgatctaaaatggtgaaagcgataacttacgtgtccaagaagattaagatcatgatctgcatgacgaaaccctcgattcgtcttgccagttatgatctcaagtactaatacaccgaaactgaacacatcagatttcacagagaaatgtccatcaattgcatactccggaggcatgtaaccactgcaagtagttagagcattacagttttgataattactacacaaagatagatatagagatagggtgatggagtgtccttactaagtacccacgactctgtttgtgcttgattcactctgatctcccccaaaagatttagccaatccaaaatctgagatcttagggttcatatcattatctagtaaaacatttccagcttttaaatctctatgtatgattctcaatcttgaatcttgatgaagatagagaatcccacgagctactccattgataatgttcattctcttcttccaatccaattctgtacttctcctttcatctttattcacaatcattttataaagttaagcaatatatatggtcattaattaccaaaaaatctacaccaagatcatgagattgactttgtaaagtaagaacttaccaaatataaagaagtctaaacttttgttaggcatatactcatagatcaacatacattcttcaccttgaatacaacaacctaaaagcctcacgaggttacgatgttgaagttttgcgattagttttacttcgttcttgaattcttccactccttgtcctgagttcgcggataacctcttcaccgcaatctcttgtccatcttctaacttaccctgcagtaatttacaaagaaaataatcacaattaaagatttttaattagtactataaaagcaatatgtgatggttacattatattcaaccttataaactggtccaaaacctcctcttcctaggaagttcacgtatgaaaaatcatcagtggctatagaaatcgtttttctgtcaaaaataggcaagtccaagtcctcttcctcaatcccttttctgaaattttcacctgtaaaaaaatagtaactaccaaaatttcaatataaaatacttgagagacaatctcgtaagttctaagaacaaaattgaaactaaaaaaacaaatcacctcgatatctcttcattatcttctttctgaaacatgcaaacactacaaccaaaacaactgcaattgccaccaccgatccaacgaccattcccaccacttctcttcctttaaactctattttagcaaaacccattcttatgtaaacatcttgtccaaagctagaatactctctcatatcaaccaagtcaccaaaccaaagcaaacaaccttttcctccctcgcgaatatcggtattcgcataagccgtgcaagagcagttacttgaacacttgatcttacaatcctcaagtgtcatttcattttttgcatcataccaagaccatgaagtatctggtaatttcagacctggaaacttcacaaatgcatctttcttttcacagttggttggaatctcatggacacacccgtatgctcctcttgaaatattccactttcgacctgatttaggcttgaacccttgtaaacatgaacaagaaggtgtgtttttgctattaatcccacaaactgcgtaagctccacatatagagtagtagtcacactcatcttctggtgcagtgtttgctaagatccactggttttgcttcgactggataaacctatggagtttccctgtgttgtttaataccaatcttgagacaattctgtgccgtggagtccacgagtagtttacttcttgcgcactcgacgtgaatttgtagtcgaataagctattctcacgtcccatagctggagcgccggtgaaggataagccgttccaagatcctaagcgataggaataactcgaatctccattcttccttaagatcaattgtggtaaacctcgagtgtctagagacaacgtgaaatcacctggtgatggatcttttagggttttccaagatgatagagaccattccatttgtgtcttgaagtttttcccaagcttcatacccgcgagtattgtattcatgggataatcaaaactctgccacaacacagcttcttctccgtcactagatatgagattccctgaacatgatatcttcaagagaggattatttgctgttttagaagcttttgttgatgatgatgatgatgaccacaaggctttgtgttcaccgtcgaatagctgaagatcgccaagggaactcaagtttaagaatccagatgtgccgtagagagggttgtttcggttggccacccaaacgactgcaaatggttccatgtaccacaagccaagaaaccgatgttgaggttgctcttcttggtcaagactaaagaacccaagttggaaaacctggtctggagaactaagggtatctccatccttaaggaattcttttggagtgatgacattataatccaaagcaacagagagagaagatgaaattaagaacagagataacgaaaacagagaatgaatttctctcatcgaatgaaaccttttttctttctagttttgtgactctttactaaataaagcaatcattataatacacattatgaaaatcacatacagatttttttattttttttgtcaacttcgtacaacccaacttggcataagcgacaagtcaagataaattcaatgcagattgtctgtggatgttgaacttcaatgataaaacttttcttcagaatgaaaaaaaaaattattagggtgttttgtttgaacgccagagacaagatatgattcctcattaagttttgatggccatgttggaagtttctcagattaagagtgtataagcctagcaaggacaaaagcaataaatagatgtggctaatcttccttgacttagtcaccatataagggagcgagtggtcagaatcagatcattgatagtttgatatgtacattgcgacgattcaagtaaaattcatgcattgcattattgatctggtggatatagccaatcgttggcgacccacaggtgaagtcctgacgtgacatggctcagtcaacgcaaatactactcaacttagagacgtagctggcctgtatctaattgttttaaggcccatatacggcccacgcttccattttcttaagtatgcttttcgtagtggactgaaaccttttcttgtctattttctccaagtcgattccttgatgatcgatcgagatgaacctctatcgaacagaaacttcgtttctagaaattaaataagcctccatgaacaacagttttttcttttttttttcttttggctactagtattcaaaatctttaacatattcgcaaatttgttaataaaatgtatttcactaggaaaatagagattggaatttggaggcgaaaaaacattagtttacaacaatagtagttgaagccaagatccagagttttcctattgattttaagggtccggtttattgtaatttccgactattttttagtggaccaattatttggcaagtaagaagtttttttaaaaatatagaccatatgtgtataatagtgaccggatggcccaaactgacatgtaccaatagaaaatgaagacctaattttggcacatgaacgtaacaggtataagatcatcgttgtctctagcgagagagctctgtaatgcttacacttcaacgtggagactgtaagagatacgtgtaccaagaaacgtgaacgcaaagaaggaaaggaaagaaaaaacgtgtacaaaaagaggcccatgttaatcatcatcccttaggccttcttagcttatgcattgtctctttgctagtctttttctcacaatcgtgtcgatatattttaagggtttttaacgtgtggtttttctgtagggagcattagtagaattattgattggttttattcaaatatagaatatatatatatatatatatatacataaaacatttattgatggatcattgaatgttcatttgttcgttacaacattttcttattcaaattttatcgatccttgaatcaaagactttgacataagcgaaaccattggttacttctctaaattaaaatgaaatggtagtcttctaataaatatatatgtttaacaaacaaattggcataatttgatcgttctaaccaaagataggatttcgaatccaaattggatgggatgactagactattagatatttagatcgatcaccaatcaaacaaaataggcgtgcttttatattcattaagctggtttaaaacaacaaacaatccagcatttttaattttagtggttgaatagttaagttaataaaatcaaagataaacagaaaacaaacagctagtttttcaaattttggcgtttaattttatttggaatatttttttttaataaaacacacaaaaaaaaactcttttgacaaaaattggcatcaatactgcatatcgcatagccccatacatacatgatacatgccacatctcttaaaagatgagaacaagaagggatgtatttgaactattctgacaatattatatatacacacacattttgaatatgaatctctcttcttcaaagttctgacttgttccaaaattcttatccacacaatggaggaaaaaaagaaaaagaaaagccacaataatgagccataaccacaaccacacccactcaccagagactttgtgtatccgtggctctcatcatgacatctcatcttcctttgattcttcacaccaccgtcgatcgccacgtaggatttccccaaatcaaagcattccacataagcacaatcttttatgtggccagagtttaatcaacatttgtttttcttacaatgggttcgtgagagccacaaataaatcaactatacgattaaataaccatatctaacaaaaaaaaaaaacattaaacaattatagtccaagtaaacaaatactcgcctactatgtaccatattagaaagttttttattctcccccaataccgatatattattttgtaatttaaaaattcattgttatcttatcctcgcaagaaacacagatgttttggatcagtttgggaagcgaagaagtatgggagagaagtaaaaaacaaaacaagtggtttataaaaaaagagggaaagataattgaacaaagatacgtggggcccattaaacttgtgttatggtccagacaaatcccaggtgggctcacgtggctacgaagcccattgagaacctgattcgtccacgtaggacgggacagaatctcgctctcctccttccccggctgagatctcgccacgtcatcgactaaataaatctctcccaaaaaaatatctcgaaactgaaccatgagtttgtcgccacgtacaaacggggtttggctttggcccatacgcattaataactggttttcaaaaatcatttaaacttatttatcctaataacgcataattaatgtgttttacttaaactgtaatgattctaagtagaaaatgtgaaacagtattttttatccacaagaaaaaataaaacacaaggataaagctaaaaacaataaagaaaacattactgactcaagtaatttaaataattgcagcagatatagatctgataattatccaaacaaaaatctcaaataaaggttaaagtgataaacccatctctaaagcaaaaagatttttaagttgaaccaatccttaattgattaaatactatacgttattacaaagttaaattgaaatgaaatggatactaaccacagaataaaaaaaaaaggaaggtgctatataaaatagagtcattgtgaaaccaaagaagagaaatagattttttagcagaaggcagaaaaagacgaaactagcctccaaagaattgttgaatcacagaaaactcgccacgaaaaatatcccaaatcctgcaacttgcactttcctattcttcttcttctttccttatctctccaaggaaccaaagcatagacacaaaacgaacaaccacagaaacttgaaagagagaaagagtttgattttgattaaaatggggaagaagtgtgatttatgtaacggtgttgcaagaatgtattgcgagtcagatcaagctagtttatgttgggattgcgacggtaaagttcacggcgctaatttcttggtagctaaacacacgcgttgtcttctctgtagcgcttgtcagtctcttacgccgtggaaagctactgggcttcgtcttggcccaactttctccgtctgcgagtcatgcgtcgctcttaaaaacgccggcggtggccgtggaaacagagttttatcggagaatcgtggtcaggaggaggttaatagtttcgagtccgaagaagatcggattagagaagatcacggtgacggtgacgacgcggagtcttacgatgatgatgaggaagaagatgaggatgaagagtacagcgacgatgaggatgaggatgatgatgaggatggtgatgatgaggaagcggagaatcaagttgtgccgtggtctgcggcggcgcaagttcctccggtgatgagttcttcatcttctgacggaggaagcggaggttcagtgacgaagaggacgagggctagagagaattcagatcttctctgctccgatgtatggatctatcttttttaactattttgtcgggaaattaacagagaaagttttggttttaattatcggtttcgttgttttggaaaatgcaggatgagatcggaagctcttcagctcaagggtcaaactattctcggccgttgaagcgatcggcgtttaaatcaacggttgttgtttaactcacactctaccgtatcgtcagaatgaacggcgccgatacatcgtcttctccgatctttgcgatctccaaaacaagaagagatctcagccgttgattcctttttttttcttgtttaagtaaatcaccaccgttcagttttctgacaatactttgttttagagatgaggtagtttctttctttctttgaatgtcgtacaaaatcaaatcttaactttttatttttcttatcaatatcattattatgttgattttttttttgttaatctacgtaagtaaattaatttcgattcgtaagtttatgacttatgttatatgattatattcaatggatcaaaaggaatgggggagagattggtggcagatggacacaatggtatacacataccgtaaaaataaagtatatgatttgctttgtaatttcgaccactcaattgtggggactacaaagaaaatgaaattaaatatgataaaatttcgagagatttttataatgtaatgggtccttgaggttacattcattcgccaagaacattgaacctgtcatatctgccgcgtctgtgaactgtgtttgatggtccataaaatattgacacccccatgttttaccttataacgttatctcaccatgttcttcattcacatgacaggatcacatctttgttcaccatagttctttcgattttaatttaaaattttactcctattggtttcgtgtgtgtcatttgggtcctatatacatacatcaaaaccgtttatcccttcttttttttaaccacttgattctctggcttaccgaggaactggtgttgtgggggttggacagttgggtctctctcgaattaatttgaataaaacatgtggttctcatttaaactacatattcttttaacgcaaattcttatattgtttcaatttataagtttttatacgattccaacaaaacaaaacaaaacattcgaaatttaaactcattataaaatcgatataagaaagtagaaaatatttgttaggaaattcgctgggtttcactatcaacgcatgactagcgtcaaatacttcaaccattagtccatagttccaattcctaaagtcaaaccaaaaacctaacggatcagtctttatcccgtacgttgagtttgactattagattaaactacactaattaactacaaacctaacattcattcattttattcaaccataacgtaatttacattcacacgacatcgtcaattccaaatataataattcaaaactggaaacaggagatatgaaacttgtcatttgaaactctatgactggatcaataaattaaacatgcgagagtatagaaatgattttttgattagttccatatttggtagcttcctcatgagaaaatgtatgcatgagaatcgagaattgtcacaatacatatgtgaatttctcttctcttctttttgttcctttgtgcttttcttctaaattgattttcttgtcatgataattctttagcaaacttgtttttttttctcttttaagaaactttgagttgttagggaaagagaagtgcggaagagctctaagtcagccagtgtagatcacaataatgaaaaaggaacaataaaaacatcctctgtgcagatatttatctagaatggaaaccatgcaaagaggacagagttgagcatatcctttttaacattaattcataccatattattatgtgtaaagtgtgagtgacataaatgttgtaaataatctatgttgtaacataaatgttggaaacggatgaacaattagtatgaataattgaatactttggtcgatttgttttaagtgttaaaaaccaaaatagattccatcttttagtatctcatcggatatcaaattagattgaagattaaggtcataaccccaaaagggtattgtttaaatgtgaaagtcatacatggaaaagggcattgtttaaatgtgaaaatcatacatggagaattataagaagaacaaggactgggaataaataatccagaggagattccagagacttttcaatattgcaaaagatagcaataaacaaacacacaaacacactcctctgcacaaatccgttttgtttcatccatcgttgtacctacgaattccaaaagaataagaaaaaaacccgaaagaatggtcggtggagaccactcaaagttgaaaaggttgtttatattttacctgactgtgaagagggtgaacctgatgagatactaaggcactttactcatctgtaaaaggaagagggctcaatagttattcgctttggataataaaatcatacccagacaaccttgttttaattaattagcttgatgtcaaatatccttctacaagtgtcaacttgtaagagttgaaactaagattcacaagaggagtcaatcaagaaaagatcatgtacattttcttttgcaaacctaggctttgacaattcatagctattttgcatcatcttacgcacagttatcatatgtctagaaaagtgtataacaaaggctgtcttagcaatagactagctagatcaaacaaagagaagtgcttatgatttctatatcactctattctcaagtttttccctagtcaagttttacaaaatgccaccaaccagatattttctctaatttactgaaaaggagtttcgccaggaagcacaggagatttgtctcttctcttctttatcaagtcaagaattgtgaaactttgcttactattactccaaaccagatcaaatatagaaaagagtcaagagatcacccaaaaaaaaaaacctttcttggtgggggccaaacgcaattttcttctagactgagaggtatcaagaatattcgaattgaaacacaaccagttttagtaaagaagagcaaaagcagtgtaggaaaatcatgaagtgagaaaacgttgaagttcatttccatacttgctcttgcattgcagtgaaaatttccaaaaacttctagatagtcatcaaaaatggctacgaaatttaacatacactcaacaaagcaacagacacaaaaaaaatatggaaaaatcaaatacttttcgatactaaagcagaaagttaagtaaccggctcattcgtaaaaccactcctacaaggtgaaacagagtcgagcaaattaaaagtcacaatactctaatttctgaagacgaatcatagaaagatctaagttttacaagtttccatcattggcaatctctagaaaacacaaagctaaggtattcagaacaattccaaaaacttatgccaccaccaccaaccttatatagcaagtcaacgagagaaagtaatgaatggatcctaacctttgatgtgttcatgatgatcggaagcagcagcagcaatcttagcctcatgatcttcatcatcatcatcgtcatcatccctacgtgatttaacagtgacaatagcttccctggtagctccaacattcccaggaggagcaggaccatcacgatcatcaggatatctaacaacaacaacaggacaaacacaatggtgaacacaataatcactaacagagccaagcttgccatcacttcctctcttctcagcaccaaatcctctgcttcccattatcacggcgcttagattaagcctttcagtctctaagcaaagcctctctctcatatcgtgatctttcactatatggatcttatgaggaaacccagcttccttcaacggcttcgctagatccgctactttggaagaagtaaacgcatcgaaatcttcctgactaggcttcggctgagctccgggatcggtagcggcggaaggaggaggaggagtttggagagggagaggtccccaatcggcgccgaagagaacggaggttggagaaacgtggagaatgacgacggcgtctccgggacggatgtaatgatcgacagcccagcgaacagcgaaagcgctttcttcggaaaggtcaacggcgactccgatcttacggcgagcaccggcggttggggtaggagtagcggcggaaggagtggaggaagagtggtggtgagagtgacgaggagatgaaggatggtggatcttgatgttagggagatgaggataatcggaatctggattcatgatcgtcttcttcttcttctctgctttgattcaacaatttatagaaacttttgactattttccgatcgagaggaagatgatgatgatgatgaagaagagagagccgtgtttgtcagttttaattagtttacaaattaatttataagtgtaattaattgctaattgtttggataatggatgtattaaattgtcaagaagttgaaaattacgagaacgtgctgagcagctgcttattgaggaatcatagggaactgttttatcttatcagtttacttttataatgggccgtgtgttttgatattaaggcccatatgtgttttgtcaaacaatgactttatcagtatgtcaaatttgctgagcaattgttgtcgatcgtatttgtttatttgtatttttaaaataatgatctaagaccgaatctaactattttcaaacataagagttgtgatgaataatttttccgtaatacatggatttacggatggttctatttgcattacatccacaatgaataattttatctataatacatgaaatcacgatgaaagattgtacatacagtacgctataactttcaataacttggttttctccataataacttaggtttttgccataaactttgtgtagaaattttctttttagaaatattgaactactggatattgaactttttttggttagacttctatagtattgtttcctattctgtttttattttcggtgaaaaacatttaaactactaaaaaatcagtgaaatagccgttcagaaaaacattttaagttttaattaactatatagttcgatttttatccccctaaaaaaaaaaaaaaaaaccatcgagttaatttttgcatatctgttttaataaatttaaacatctaactaattttagccgaactaaaatcaataaaaaagcatcccaaaaataattgataaaatttcatattttctataaataaacaaagcaaaatcaatcaacttataaaaagaagataaactcaaaattctcattggccaatttttaaagtagtttatactgtactaaatttataattctgatccaaaacaaaacagtacgtaccaaacacatgtataaattttataaatcgaaaacgaagctgtacatcccatatgctatgcaatgacattaattggaaaagctataaacaagagcaatttgatacatttatctcacaccagataacaagattaatcagatatgcatgacaccgtttcgaaaaccgaggattaattaggtgataacatgaatcatgacaggatcattgcctaactaaagaaacacaaaatggatacaagccccaagatctgacacaactttagagagagagagggagagagaagtttcatgacaacaattaaggaagagaacagaacatatatgtctgagtgtttaggttagaatctcataataaacaaccaaaagggtaatccaaaagctgaatctttctttcgactcagctctcagatgcatacaccaaaaaaggctctctcttttttttcttctgtttcttactttcatctacttaaaatgttttttctttaaagagacgattttgtttaaatcaatatagaaagataaaacatttaaagcttcaaggacaaatcaatggtattaggactgcaatcacctacgagtgacgacgttttagccaccactgaaactctttcaccatatttccccggaaaaaactcgtactccttcacacctcctgatccatttctagggtttccttccatgtagctcccaaattcctccattggtccctaaacccaccagttaaatcaaataagatcaacagttatatacatatatacctatatatgagtattaataaatggactatacttagtaccgtatgatttgttgcctcgttgaaataaggattaatagtagtactagaagcagaaactgaagctgctctagcgattctatgatcataaaggaaaccttggctcctctgatgatgatctgattgaagaagatactgatcgtagccgttcatcggaggaggaatcattgtgtatttcgaaaatccaccaccgttggatcgaactacattattctgatcaccatccaaacgtttcttctgcagttttttacataaataaaaatcaaaactttttcaagtgcaaaaactatatatatatcaatcatgttgatgaaaacgattaaaaaacaaacaaaccttgaagcaagtgtcacagcgattattggaagaagcgttaaacatttgaggatttgagattgaagagagctcatgagtagtggaggaggtctcaacaaaaccccatggagaaataaccgggtcgatcataacctgacccgacccgactccaccacaatagatcctgttgctcccgagtgagcttgggaagccttgtagcacaacacccgggtctaccggtacgggtaaacgggtagcgttgttagagatcgatgctactgatgacgtgtctccgactgtggcggcggcgagttgcttcttttcttcttcgattctctgacgctcgagctttgctacacccattcctctcaacgttggtttcttctgtttttgctgacctgtcttcgatcctggtttccgaccacgactcttcagtgtctctgtccggatctcgccggagctgttgacgacaagacgggtgtttctcagaagatcgtttgggtttccgacggagttttgatctgttgacatgaagaagagagaagtcgccattgatgatgatcttcttctcggaactctttttagatagagagagagaagggaagaggtaaagacgaaagctttaagtgtgtgtgttttgtttctgctctctttttgtgtgtgtgtatctctttagtgttcatatactagctcaggcaaagtacttacctgtgtttttattttctgttatttccaggtactatatgcggataaacgtatctttatttcttttttactttttaccccctatagtagattaaattaaagtatttttcaaaaagattagtaaagtatatcataaattcataatacgtattcttattttatactttcttagtcttattaaccttagatgttataaattcccttagcacttgcatgcatttttaacttatgtgtgtatagtcgtatagatgttcaatttgtcaatattagtgggtgtaagtcaagagacgttgaaaaaaatgcattatttgatgttaatatggtcatgaaaaggaacaactgaaataaataaaaaagagagtttgtaactgaaaactatgttatatagcatgaatgtatgatttgattgatgttgttatccatgcattggatcgtggaagaaattcaacattatagtatgatagttagttatctttggttctgtccattaaatggtattttttattctttctataatcttcaattactccttaattaattaacctacctcttaatatatagagttttgactaaataactagatatggaatactatgctgtacatctataatactagtatcggtgtaaagagtaaagtgggacgaattctcactttgcaacgaatatgattagtttgtgaaacagatcaaagatataatgatttatagtttttaagaatttaaaggagtaacaacagaacaaggtttcaaatcctttattttcttacatcttttgggcgaagaatgtagaaaaaaaacaaaaactcaaagctatttatttacttgttcctgataaaaaaaatcagagattgtgataatccctaccatggagacagcaaatcggagattgtcgctactcgcataggctcagtcgtgaggtgagaaacactgtccaatagtaacagcgcgtgcatcacattgcaaagaatatagtacccgcggatcgaggacaggtgtcgggacgttagaccattcgccgattgtagcgagcaaggtctgggacaacgtgattttactcagctcatatcaactaaaataagcaagtccagttacagtcgcagactcgcagttatatgtattttttttttcttcaaaaacaaatttttatttactttgactaatgtgatatgtatatgaatatatgataaatacgacgagtaagcttaaaaactcactatacttagctgacaaataaaatactaaatacaaaacgaaaattaatatatttgacatttatttgaaaaagttagctttcggtatttgaaaaaaaaaatcgagagatagttattgcttcacatgagaggaggacgaaagcaaaaagaatagcatgagagacgtgaattacgagaagggtttggagctacggagtagagtagaaatgatggctgcatcatataaggaaacattttaaagctgcctccatgttaatcttggcttcagcccaatacctactattagaaaattttaattatcttaatacaaagtttgttttatatggatattctcaatacaagtcttaagagaagccccactgaagtaattatacattactatgtgttgagatttcgttttttttttatataaatgaagtaaccagatgagatgttgtacatcttaaatggctattatatgatctacgtaaccgttgtaaatgtatactagctaataataaaacgtacgttgttaaacaaaaaagaaatacaaatatatttaattatttctccattatgtatcttattttttctagttatcagtatttactcgattccaaaggtacttcgaattacctttgctaagtacgttttctgagtaaagttatcatataacactcaaataaccttttttacccccaaacaaaacaacttcaatatgtatcttcataagttcatatatttataaaacaaattactcacttcttatactcaaaacattcatgagtgacatgcaaattcactctgcggttagcgagattttgttatacgtagataattaagaagaaaaataaaatctgaattaatcactggaaataaatccaaacggcatgaccaacccaacattgcaacatacctacactgttgctataagcctagaatgacacgcgagatgataatagaattacactaaatcgaaataaatcaatatcgaaagattttatttctaccaagtttaatttgttcaaaaataaatggaagtatatgctttctatttcggaaaatagctagataaactttgatatagataccgcgtagattgtattgtgggctaggacaaggaactggtagggcaaaggacgaaagaggggaccccacatgtgctttcatgttaagttacggatagtggtccaactgacacgtgtcatcacggggaccactttagatggtcattgggcggctactactagggttttttttccggcacgtgtaaagaagaaccgaagcgtgtgaaggtttgatttatattgctgggtttaggcaggcatagaaagattcttgggatccgtgaagcatattgtgttcctttctagaatgattggatctttctcttctgttttttttacttctcctcctattagatgatagagccaaagaaaataaataaatattattctctttggttattgcaaatgaaattatttatgtttcataacactgtttaacttagttcatagaatgttgttggctgccattttaaaagctctgcgaatcctcataatacaacctatcactccattttgatttctctttgagatctctctaatacaaattgatagtatatgcacactgtgaagtaaaataaatgtagacaagagactatatagaggacaaaaggaggcagagtaggtgaataaatgagtgagtttttgggaagtgtaaaaaagaattctgagaaaatgaaaatataagaaaaagaagaaaagatagtaactgttagttttggctttatacatcatcttccttatctatctattttcatacaaacttgcaaacccttccttaaacctccttttggaccacctctctctttccctctctcatcttattttttctttcttcttttctaagaatttaattttccaagattttctattatcattactttagatctctcaatctccaactgagattctctccctcccctcactcagtacagttgtagaccccctattcaacaactatactacagctttgcctttgtctctagattcttcaattctcaatctcaccaaaaccaataaacaagatatgaaaatgtgctcaatattgtttaattttaagtttagttagtatagtaacaattaacattattcttgatcaaacttacaagtataaagttagatatggaacaaggaggactaaggaagtacaaggtttttttttctttttctttctatgttaaaacttgaaagtaaagatttggaatggagggacaggatcagagacaatgttgaaatctggaccgtccaataggcagagacaaatctgagcaccagatattctgtgtccaagagtagaaagcttttaaatagggttttgtgacttcgtgttgtgagaaatgttttttcaatattaaataatgtaacaaaagctattgtcactttcacttgttagttgtcttgttcttcaacaaagacactgcaagtattactggctgcagtacaataaaatatttcgtatttgcaaatatgcccctatattcagccatgtattgcattctattaatctacataacttaagttttttcttgagaaggctacattcttgggaagtatgaatgaagcacatagcatccatttccctggagccacaaggcgtacctttcgcatcttcacatccacggctacctcagataaagcaatccgtatccgctgcaagtccaaaacaagttcattgagcggattaaacatatatcaatcattatattagctcaatcaaatttgaatagatgatagagtttgatgtggtttttcatccttttagacctcgtggaagtcgaattctggatcagaagccttggagaatccatacacatggatggttgggaaagataagccttcatctctgtgcctatcgttgtatactccgcgaaatgcatctgcttgagtaaagtattaatgacggttaagaggggattgtgagccagaaaaaaggaaacttaagtaggaagtatataagaaacctagagattcagcagcatcttttggtaaattcatgactacttgggtgactttttgacctttttcgcttgaaaacatagcctttatgaatcttcgtccgtccatgttaaagatctagacatagatgagaagatttataattctacaaatcgtttgaagtatgaaacaaggtgtttagaattcgcacttacctcaattctcttctcgagcttattgacaacactattctgttccataaattctactgcatgaggattcaggtcattggcatatacacgttttacaattcttgctgcagcaagtgcgataggaccaactccagcaaaaacatcacctgtcaaaacgacagcgtaggtaactaaacagaacaagacatagacaaaacttgaaacaagacagaaaagagaactccagactagcaataacaataatacaatcaatgtattatctatctggccgctacatatgcttcttatacaacggagaacagcaaatttcaacaccaataggagggacaatgcactttttaatgaggagatcagtggtgctaatttataaatggggagttcaatagagggcatagcaataattttcatgatgtatcagttctaagtagcaaacatacagacaacgtcattttggtcgaacccgagtagcagcctctgtctttctgtcccaagtttcgaattccaatatctagcacacgcaaaaaatgccaaaaacgtcaacttataagcagatatatcgctaaatcacatgatacgagatttggtaagaacatgttttctaagtcaaaagtagacaacatttctcctctgactgaaaactcaaaactgatatcagacatcttacacaaagctactttcatcaccgaattaagtagggtaagggctaatttcaaatggtaaatggtatttgggtcatcatcaaagcactcaataaaagcatgcatactataattggcatttcaatgagaaagaatttacatacactctagctaaatcaacatgaaagcgcagtccattttcaacaactagagtcaccagcgaatggtttccagctaaaacctctagctgcatagttctgaagtcattgtggataggatcaatcttattcacaacggtttgtatctttggctgattcttgtccaggactacctgaaaagaaacagaaaataacaactcagctcactagacttcaatttctgaagctgggaaaatttggttacagacttgagcaatgtccagttgtccactgtcacattaccttagctatgagccttttgtatggtagatgctcatctcttaggttcagatgcgcaatatgccccaccatctcaaatgccgaaggcacaatcatacccttaggtagtacagcctccaatatctacaacaacaacacactttgaagcaaaccaactcgatctgatcttcaagagaaaataaagtcagcttgaaagtctcatcatttacctcaatcattggccaatagtcatagaacaaagtcagtctgcatttcactagctcgaaacttaagcttgcatcagccattttagcttctgcaaacagaacctaccaaacagaaaccataaagattctccaacaacacaacataaactactggatcaaaccagatgagtggattcagagaagatttctaaccttgatagcctcaggcaagtcttgaacttcctcaccggaatatttctcatccaaaagcaacaatcttgttgaacctctccatcttcctctactaccatagccttctcccaataacccctcaaaatcctcttctcctcctcgagtttccaccacttccaccaccgccatttcgttgcgtctgcttgctatttccttttccttcccctcccttgttctctctgtcttcctcttcctctttggccgagaaatcttggccaagtttctgaatttgagatacccagttgaattaaatgtcctggcgagtttatctctatgcaacactgaactcaatctctccccatccccttctgctttccctcttattctccggttaaccgaatccacaacactatcttcatcttcttcttcttcatcagtctcacggcccaacagcttcaccacatcttcttcaatctcatctccaggaaccctagcaatgttccgaatcctaggccaattaagaagatgaccacggagacgattctcgagcgcgaaacaatccttcgccgggactcgaatcgccgaaatctcaaaaaccctagtaaattcatcttcattcaaaagaacatctttctcaattgattcatcaaactctccaattttgcctcgatgggcatctctgtctcgaccaattgaagctaatctaatatcatctagcacaggcttctttcctttcagaagagacgggccatacggaaaggtggtggaggagagattactggagaagacacagaagataagggttttaggtttgggatagggtttaaggataaaacgagcagagtaggaagagatgactggaaaaggaagtgaattggctcggaaaagagaaagctttgacaccattttctgattcactcagcttcctgatggatttgggttttggtgttgggacaatgaaggtcatttcccgcgtttgtgcatcaaaggtattactcagggagcatattagagatttcatcggcaataagaacgaacatatcactctgctttcagatttattttcaaaaataaattatcctaaaattttaaacgacgtcgtttcaataactaagcgtcaaaacgatgtcacattgacatcccaactagactgtttacaaaaaaaacaataaaaagggtttagggttttataaacaactagactgtttcatgcatcccaacatttatcaggaccaagattcgtggaatggaactttgacatactgattaactaaaaaagggtttaacttaaaaagaaatcaaatgaagtagcatgagaagagaaaggttaggataatatgagttgaaataaaaacaaattagaagaaaccttaaaccctattaagttataagtagtcacacatttataactgtacaaaagcagagtggaacccgaatgattatcacaagcaaaatatggacgatacaaagatcggttttcttttctttatttttcagatattagggaaattaactcaaatctcatcaggtaatttaaaactctgtgtaccaaaaatctgaagagaagagttctgaagaaagacggcgactccacatttgctgctgttgaatccatcccagagcgtaaaatgagcagtccccgagactggcttcttcggtgctacatctttcacagtgcacatcttttccatctttcttacaacgtaatcattcgacaacattcttccttcgttctctcctcttgcacagtcgttcacaagcccggtttcgtatattgccaccattatgtccattccgtctccgtctactttcattctcaaagctccggtgagtgatacttgcagtgtctctgaggttggtctctggaaagtcgcctggtaaagagagaaacaaatgattaatattacatgtgaaaatttcgacaaaaaacaccacttatgtggagagtgacaaagccaatgaagaagagtgagccacattgttctgtttagtcaagaactcattgagttcaagagcagagaaaattcatggttgaagtaaagtttagttaggtagctaatcctatgacacaatcaacaagaacatgtcgtcgaacaaaaatttatcacagatgttgtttagtcaattcaccaaaagtagctaattctaatgcaatagaagcttgctgcattcataaaactacattccctgtcatatatacctataactatctagaaagcaaccacattgaccacttttttagcagagacaaaatccctctaaaagcaatattactcctaaatgtctaatgatcattttgatacagagaaagagcatcagcgacctggatacagccctgtacctaaagagaactctttgatttactatattaaacattcacaagactcaaggacaagcgacactgcaaaccataggacacattttcctaacacagagtcagatacaagaacatgctcttgaatctgcaggcaaggcgcaagaatcagatacaagcttcacttggaatcctataatattctcctatatatttagcaccagaagacactcaaacaaaacaagacacttacattgaaatcacataaacaagagctgaaatctaccattaaatctaattccttcacatcaagatcatcacaatcaccacaacaatcgaatagtttacaatgttacgaaaactcacccggaaggctggagaaggaaacctaggcgcttcggagatagatttgagcagcgtctcctcttcgtttccgatcaattgagaacgaccttggatcacaagctgcggagtaaacatcgtatccagattcaacgcctctatatacgccttctgcctcaccgtccattggctcgatccatacggatctttccaccccttgtaatcccaataatccacatgaaacaccaaaaccatcgtcggagatccagatccaccatcttcgccacggatctgagcgtcgaaatcacctcgacctagccgggacatcaacatctccgccgcgggcgatgttttacatccctgagacgagaatagctggacgagaacgggaccatctccggcgggaatttctgcggctacggcggcggaattgttaccaccagagataggtttagttgaagatttcttgaggccgaaacaggcgaaaagacggcgcgacattggataaaattgttgaccgtctcttcgcctcctcccgaagaaatcggatataagaaagaaggaatgatctggagaaaaacgaatcagaaaaaggtgttttcccgagaaaatttgagaatgtctttcagagagagatcttcaggaggaagaagattaacacgtcgagcggcaccgagagaaacgcggcaaagtgtctttacctttatactgtacttctttttttaataaggaaaattctcaaataaagtttttttttataaaaatggaaaattatcgtattggtggaaaaagctgtagaaataaaaaattaaattggagcttttattatccttgttatacgggtcggtgacacgtcgggaaagacaggcgaatagttttgtttgagctggccaacgagtttatttttgttttcgtttaaagagagaattaaaaaaacaaatctttctcgtcctggcaaaaaagaaagaaagatttacttgccaacctcaacaattaaaaaaaaatgttatattgcttctttgtatattttttaattgagaaaacactttgacaaaaagaaaacaattaaaaaaggaatatatatatacatttgttagtttaacaaatttgagattaaaaagaaaaaacaactttgctagtgggaattaatatggaaagaaaagattagcttaagagacatttagtaaagatgtaaaaaaaaatacatgttaagagcttcaactagtcatacatgacattgtaaataaaacaaaatatacccacaaagttctatagttctaaaaaaaacttttaacttcaaaaataaaacaataatctaactttctaagtatagtttctgaaggttaaataaaatttgacgtccattttcttttcattgctgaaattcattttgaaataaaggagaaccacatatgtttttgtcccttcttcttcccttcactcgtttttgctcttgtaatcttgcttgcactttttctatggcttgttcaatcgtatccactcacattgtgttttccttttacaacatgccgcacaacagcccaagcttacggtaattttcttaaaatgatggcaaacaaccactttatgatcatataaatgaatatagatgtgtatatgtacttcatatttgaaatcgattgaatgatttggttttgaccacatatggaacggtccatgcaaatccatgtggctgataaaactacgacaagtaaaaaaaaagacgcttcatgtaagttccaacataatctccaccactatcttggagcttcactctcacacacacatcatcccatcatttttcagtatatatagaaatattaacatacaatatatacttgcataaactaacttggttctcttagatatttctttagagttaaataatcatattcaatttttttaaaaaggatgttagaagggaaagcagtaatgggtgatacagatatgaagcaaacaatgaaggaagatgctcttagtttggcctccaaagcccttgattgctttgatgtcaccgaacctactcaaattgcccgtttcatcaagaaggttcactaatcatatattgcaagttttaatgtgtattaatcctgactagacatgtattttctacctatacactgtacatatgtatactgaaatgaaatatgattatgaatgttatacaaactccataactagagtttcatgtcaatgaaattcaaatctttttgattttttcaggaatttgatagaagttacggatcggggtggcagtgcatcgtggggacgcatttcggatctttcgtgactcattgcagtggctgcttcatccatttctcagttggcagccttaccattttgctttttaagggatcagtcggtgaaccggcccccccggaccgatgctctagctaatttagacagtattgtaaaataatcaagtccttttcgattgatgtagtgttaaagttaaagagtattcaagttctttcactgtaatatcaatcatgattcgtcgttatggatgtcttcaataacaagaaaacactgctttctcaaattacatagacaaaaacgtctagaggtcaaaaactttatcttatgttttcattagagctgtattgtgtgtagaaatcatgtggttatagatcaattttatttagcttctgccttaccagccggttagctctcagttagtttgattaatatggaatttacatcgttaaacatcctaaaacctaatattagtattcggtacatgtgaacaagatctaagtttcaataacttttcttgcaccaccaattccgatgacgaccttcatcaccatttaaccggactcttgcctttgtctctcttagtcttgttttgtaatctttcttccatttctcaaatcttgactttagtctcctgagttcttctgcgtgctgcttcctgtttgagatcgagtctgatttcacctcgacaagacttttcggatcttcgtgaattatgacgcttcgttgatcaaattctgtagaaagattattaacgtcactcaagctgcccttaagctctttcgtgggggttccaaaggacattgtgtcttctgagtcagtaccgtgacttgcagtcttgtctggagccaaaaccttacaggcagctgcgagactcatctgcaagggcatgtagatcataatctttttatataaggttttggtcagaacaaatcataagcatgcgtgacgtcacttacctgcattgacgacatatgcttttgccatgtgtcctccattgacttcattcttgtttcgttctctaaccatctttcctcaaatcgttgcaactcctcctgcaatgcagtgttttcatcttccttctgcattatagctgcttcgactttcagaacccggctctggagatcagcaagaacacaaggttggacctcaaactgctctgaaagaagttcctaaacaagagagataataagtttcagcagcggataactcagagacgcatacatcaggcaaaaatactaccttgtcttcggaaaccctctttgttgactttcttctcgtttttttcttctcattgcgaggtttgttcttctgttgcgtactatttaagagtttacgagccagccatttgcgtaccactacagataagaagaagagctgtaaattcttatccaagatagaataacaaattcatgatgccataggagagacaatgttatttactatattgcaagtgtatagctgcatcaagctctttagttattgctgtggaaacaatagctgattctcctaccacaatgtagtttctcctggcattttctccacggatatctgtagcaacagaatacattagccatgaaatcaaagagacaaaaaattagcatataccgtaaaactatttatgaagaaatcatgggatatgtcagtgatttatgattacatgactgaagtatcactgcagcattcctcatattgtgaaagtattcacgagtctgataaccacgaaattgcttctgtaatccaagtatgccacgcaaaacatacttttttctttcctcaaggacgctaatctatcaaatatgaaggtgaaggcgatataattttagatggatcaggaaatcaacataatatctacagataaagagaacttactactccagttcggaggtatattttcgtataaccaacttgatacatttcaggaggaagattgcattgtttcaaaatagcttttgatgtgctaagtggatcctgggagattcttgtgtccagcagtaggcatccatatctactccatgaaaaagccaacaacgacaaaagcataagaatgcatgggagtttggaacaatagatctatcaacaaagcacatcgataaagttgagagaccaaaccttactgcaagctcctggtgtgtcaaccgcgtaggatatcctgatcttgatattctaacaatctccaaaacgccacaacatctaagctgttgtagaacatgattttcttcgtaaagtccaggaagctgatttgaatttggttttatgcatcgaataaaatgaggagtagtgtcttctaacttgttcatcaacttgaaaagttggccctgtaaacataaagtgagtagatatactgatgaaagagattcttgtgagaaaactttacgaaaggaagatttcaaccaaaacagaaaaatgcataattcaagccttgtcaccttaaacttggcaatcacactttgattcatggagtccgaaaaggttgccggctttagaaaatcgtgatgcatcttagtagaaaacaggttcaataattgacatttgcacaatgataaaagttggataagatcaacatgcagcggatctctgttcttttccaggaagccatttgtattatagagaacctattaaacaccataatgtaaagtgagatgtttgttcattttcttgcaccttcataatttgacagatacatatcacattagaactattcatgcagatacgttgttagatttggggtaacaactgacctctccggcataatgcttaattctgaaaccccgacctctctctcccttgaaacaagagttagcattcaaatgctgcttgagcttgttggcaaacgtcgtatcagttgcctttggaaaatttgattcctcatttaatagcgataccaaaccaatgggtttctgcaaaagatgtgcgaaatggttttctaaaacatgtaagaaaaaaccttaatgtcatagtttggagcaaagcattatacaatccctttccataaggaggaaagacaagatgagtaagatggcacgctacaaaacttaccttctcaatcagatttagacactcttgattgtctatgaattcgaccttagtccaatcaattccatccccttcatattcctgaacagcgaagatactttcattaatagacaatacacatttatttgatatgtgtagttgaccagaagtagagttacacatcttcatataatgaggctcaagagtcaagagtaagaagatcacctcttgttcaagtttaaatagatgtcggttgaaatgttgctgcagtctttcatttgcatagtttatgcaaaattgttcgaaactattatcctaaaaccacgaagacctgatccttacacaatcaaaagaaattgagactataaaacctcgagcacagttacgaaccttaaatgactcaaacccatatatatcaaggatactaatagatcttcctgtacgtgagttaccaacttccagtgaaatgtttatttgctcaacaagccagttgaataagctcgcatagatgattttcgccagagaatccctcatatcagttgcctgaatatatagcaaagcaatccgcacactacctttagctatataggaattacaagtgcggtataatattgcagtgcttgtaaaaaagtaaacaaacctgtcgcaatgtcagtcttttagcaatgcaatctctaccagcttggagcttgcatgtagacaaaaccaccataagcttttttgagttgcagcccattaacatagctacattagtgacagctgtaagaaagcaaaataataagcatcacctatattatcatagtagatcacaaccagtctactaattcaaatgattaatgacagacgattaactctaccttcatctgctaccacttcgacatggttttcattgtcaatcacttcaaaagatacatttcctagccataacacagctgcaagcagtgcaaatgtacgttcttggtattcttgaggaatttgaacaatgttgaaagcttcctataacaacagggaaatcttttataaaatatgaaattaaaaaactctagcatatgttccacggaaaacagagggaggcactggaaatacaaaaaagtaccatcagtttgtgaaatttctgagcatcatcagtgcgatcaatggttaagcaattgctctggttcaaataattgtattcacttgctgctttaatcttcaatctctctgcaaacaaaattatataataaatggtctagcactagcagcttctagctactcttagccttgagcaagtaagctaatcagtaaattatatatgtctacactttgcttcagcagggatacttccaaagaatctcatatgtagctgaaagattgaattcctgcattagttcatagatatttcggtttaaaatgttacctttaagaattggtgaagctcctgcacacaattgataaaagatatggtagcatctctcgccattgcacagctgagccactcttgactggtccaaagagactactaattagcccatgaatagctagcaagtggaactggctataaagcttctcaacagaaaatttaccttttctaggagaactatggtcgttcagcacaagtagtcacacaaacatggtgagaaaataataaaagacgtgagctccatagtcaagaaaatatgacaaacaatcatacaaatgttcaagtcttacaagtttcaagtttagctccgcatatctttccctttgcactaaaatgaatctccatcagtttaccctgcaccaattcagatttactattgaatccaaaccacttctcaatttacggctgacaccaaactttcaaatttatacaaacgattttagtattcctatgaaaggaaaactttcagtcatgcaaaaatttgaagaaaaaaaggatgtacaaattactcacgaatcggctagagttatcatttcttgatgttttagcattcccaaaagcttcaagtatacaatttgtctttaggatttcattttccaccccaaagctacctccaccaagagcttccaagtactgcattgcatattttgctgtctcagttttcccagctccactttctccactaagaaataatattttattcatttgattgatgatatgaatatcagaagtcaccttcacatatgcatagtcaaattatcagtgcacaaaaagcattcagaatagaaagcatcgtaccttatgataatagattggttcttctcctctgcgtaaagaaaaattcaaaaatgtaaatgcatacaataactatctcaacaccaaaaagggagaaagtgtatgctttcactcacctctcatcatatcatcataagctgcatctgccactgcataaacatgaggagcatccaaagcattcttctgataagctgatagaaactcttctccatagatctggacattcttaaaaggatttactgcgatcaaaactggccctgctttactctaaaacagaaaacattaaaattatgttatatacctctgctacactgaaatataaacgaacaaaccagaatgtttttaacttacataaatcaagtcttgtgagtatctgacccggaggttgtagagaagagatggctcattcaaataactaagctgagtaaggtcttcaactccttctaaaatctctgggttagcagggaaaatctcctccattgctactttcacaaccttagataacacaaaactacagcataaggccttttccatatcctaagaaatttcaacaatctcaaagaacttcttacatcgtcgttagcggacagcataacacacacatcatcactagaagaagtagaatgtatcttccccaagtgccactgcccattagcagcaactcgacaccaaacacaaagtttctggcataaaatagatgcaatgtaaaaactgtattcttcttgtcattggagaaactagaaaccgcatactttagtttaaaacaataatgaatcactaaaagttcaaacctttcagtttctcctcaatgatgaatatagaaatacaacataaaagataacacaaagaagcaatcatttacctccctgacgaaatactcagcgctattgatccattcaggatcatgcgagttcttcgctcgactcatctgagcagtactaatcttcacaacttcatttccagttttctccttctctgcagattgtgtgatctgctcagtgctccaatccttgtcttctttctctatggttttgctttccagcgaaattgcattacgaaacttcgccggaagagattgacgaatcaacggcattggagccctgaaagtagacggagagggaagcgacgaagacctctcgcttgaatcaagcaggcgaagagactccaaaatttccttcactgaacttttcatcattgtagtcggaggagacgccgataaacctcaaaatccacccaccaacaaaaattcaaactttttcgtttttgtcttgaatcaatacccattttcgcgtaatgtgagttccttaaaagccagcagaagaatctcgaaaccagaaaatctgaaaattttattgaataataatctctctcaacattgtaacatgtaactagaaattcaagaagggctaaaaataataacactaaaaacagcaacaaacctcaaataaagaaactgaatttcgccaaggagaagccattccaacggaatacataacataagagagagaatttgaaaatacagagacaatgaaactctaattaggtagatgatgatcatcatcgggctgttatttatttattatccattagtggataaatgggcctttaccaaaactatgggcccaataagtagacacgaattagtaaattgacccgacacagagcattaggtgaaattctaaaattcgattgatttccgtctctctactctcgttgctttgcttcgtgccgtcgtgcgtctgacctaatcagcaatgacgaagaagaggaacaagaagaatagagacgaggaagcttccatggacgtttctgaatctcagagcgtctctgaagctactcctcaaggtagtaaagtaaattcgcgtcttggtttggtacatactcgtttcttcatctgcttaagattcttgtttgatttttgttagtgatggacactacggagaccggtgacgggaaactagcttctcgtgctcgtagcttgtaagcttcttcgaaagtctctagttgtgtttatattacataagtctctagttgtatttctcttggtcacaagtttccaactttccattgtgaattgctttgttcttgtcctatgaggttggacctggagtcatgtaggttgctactgtaatggtttacaagcagctcaagtttccacattagtttagcacttaggagaccattatgcaacatgttgaatgagagaatctctgactagttcctcttgtaaattggtttatcatttagttagatttatgtactaaggcgtgaaattcttaaatttggttactttagaacatatattataccattttgatcggagaaaaagctccattttttacttgttttatggtgtctttggatctccttactttgtgttttcctttaatcctgatgattttcttttttttaggatgagcacgaggaaaggaaaaccgatgaagagaacgaagattgcaatgaatatgaaagctgtggctgtaggtagtaaaatagcgaattcttttatcacgttttggtccatattcgtttcttcatcttcttaagatttgagattcaggtgtttactcttttgatttttcttctttggtttcgttagccatggacactacggaaaccggtgacgtgaaactagctacggaaaccggagacttgaaagtagctacggaaaccggatacctgaaactagctactctttctcgtaacccgtaagccttttgacaattccgtactcttctatagaacaattgttttgagaccggctttagctttgtaatattgatttctcgttagccattcgattagtagttttggccagttatggactcatggttctcacgggaaaatttgtcaactagctaggtttacattatttaagtctcaggttcgttagaaatttccattgggaattgctctgttctggtcctttgaggttggacctggagtcatgtagtttgctactgtcataacacttagaaaacatatgcaagctggtgcatgagagaatcttggataagttttgcttgtaaactagtttatcgttttgttacgttcctcaagtggaatgtaccaagacatgatgattatattggatagttttagaacatatgtataccattttgttcggagaacaagctgcattctggcttatctttatgttttctttggacctctttaccctttgctgtcctctaatcgtgatgatatttcttgatttctataggacaaacatgaagagaacaaagaatgcaaggaagatgaaagccgtggctaaagctatagcgttgagcgagaagtatgaagcgaaagctacaaaggacaaaaccaaaaccctcagaactctttcggccaagaaattgtacgagtgattttggttaaaaggctacaaaagaaggaaaacagttataaatttttgatagttcgatttgtctattttggtcttgttaacgtttatgttttcttctagaaagagcttttgcaattttgtaatctccttaagttatcgacctatagaagttacgagtgcttatggattttgaccagatggtaaaatatattctttagcaagactggttttcttaacaaatttccaatcttcataaagtcatatctcaagtaacaaagaaacaggcgtacatgcgagactactacttttaacattaaacaatcattcaaagatcaaagtgtgataacaatgtcaaagacatatacatatgggcgtgtattctatactacttttatatccaacaatgagctctttacacaagatttgttgtctctaccaaatcaccttggctcggtctactgaaatatatgcgctatttcgcattgtcagtctgcatctgttacttctgcttctatgtctacgactgctgttgaggaaccctttcctgcacattcaaacacttaatctcaccatttgatatacaagagatatggttacttgatttgcgcagaagtaaaacaaaaatttgggtaagtaacctttcttaggtttagaagaaaacccatttaagtcttgtccaaaagcagtagtttggttggagaatttcactggttccttaacaaacttatcatccacgactgcattttccacgataagaaaacacaatgctaaatgctttgaaaagagatatacttagataaattggaaaaaatggaagaatcatcttattacctgagaatggttgagtacagaaagggcaaagctgaacttcatcatccatcgctgacctgcagacattttgatattcaatcaagctcgatttggcgaaacaacaaaaacaactgagagggatttgattcttgttatatccttacttgaatatctgaaactcatttccacaattaggacactgcacaagcgtaaacagagagatgaaaaaccgcaaaaactagctaagtggaacatactcttgacggatttactcaaaacacaagtgctagctagctaacttatagtcacgaaactgaaattcttgaaatgcttttttaagctaaagagacaagtagacttacattgctctggacaatatctcgttgtgcccaccaaaaaaaggctcccaaacccaaaattggaacaatcaccacaatcagctgcaaaattgtaagaacttcagttcaccagcacaattagataaccagagacattaaatgattaagactttagagagatagagagagtaatacccagacagagacaatagcatccaaaatccaaccaagctgaccagtcatagagagataagtcaagccaatggccaaagcaaggtttccgagaatcctcccatttccgttgttatctccaccattaaacttcaaacccctaaccctaaccacccgtcttttacggttaagagatttctcactagctagcatcccaatatctcccagacccatcactcgctgtctctgtctatgctcaatcaagcaagctctcaaccccaacttggtttggagcatagaaggagccaagctccgtcttttagcgtgtaatctgttactgggttccttgttgaaaccgtcgtgtatggagaagttacaaaggataatctgcggaatcgaagccatcgtctgaattttgatttcccaaacacaaagctcgagttgagaaggatccacttcaacgacaaatgatatttcacgacaatgctgtgttttaaggttatattgaacattaacagaaactagagcatcgcggggatagctcagttgggagagcgtcagactgaagatctgaaggtcgcgtgttcgatccacgctcaccgcatttttgttatttgtccctactttaattgaaacgcgtcgtttaggaacaacaagtcttattttattttatttttaattcacttacttgaaacgcatcgtttttgacgcgtaatgaattaaactgtttacctttgacttgagagatgtagtagaaaaactttaagatcttcgagaacagacttaaattcatgttgcattagagtttgatgaaaaccgattgattttattttattttatatacatgtattaagatcgagtgtaatagtatatttgtcccatgttcattttttggatgtatatacgacttttagaaatttatgcgttctcaacaaaaagaaaccatcaaaggtagccctcttccgaagaaaaatatttgacttttatcaaccttataaactaacaatcgaaaactcatcccaacacaatcttctaccttcttctctaatccatatagattccacacttcagccaaaaaaaaaaaacgaggatggaggtcccaaaatcctcattgctaatgataatttttgtggtagcttcatgtttcttgcatgtcaaggcttggcatggtcagacttattgtggtggcaatgcgactccccgatgccagctccggtacatcgactgtcctgaagagtgccctaccgaaatgttccccaactctcagaacaaaatttgttgggttgattgctttaaacccctttgcgaggccgtgtgtcggggtaattatttaaccaccaatttctttttgtaattgatgatataccaatgcagtttaaaattagaattaatagaatttcatcattttgattaattttagattttgaaaatatgttttaagatttggatatgatcttttgtagcggtaaaacccaactgcgaatcctatggatcaatttgtctagatccgaggttcataggtggtgatggaattgtgttctacttccatggaaagagcaatgaacattttagcattgtctcggaccctgactttcagatcaatgctaggttcactggtcatagacctgctggccgcactagagactttacatggatccaagctctcggcttcctctttaactcccacaaattctcccttgagaccaccaaagtcgccacttgggacagcaaccttgatcacctcaagttcactatcgacggccaagatttaattatccctcaagaaactttatccacttggtaatcatagaaactcaaattttaccctatcatttttgtaggttgcgattgtttcaacttttaaacgtcatctttgtctattcgtttagattttcatgtaaacactcattattttaatgcatattatcaggtactcatccgacaaagacatcaagattgaaaggttgacagagaagaacagtgtgatcgtgactatcaaagacaaagctgagatcatggtcaacgtggttccagtgaccaaagaagatgatagaatccacaactacaaattacctgtagatgactgttttgcccattttgaggtccagttcaagtttattaatctgtccccaaaagtcgatggaatcttgggacgcacttatagacccgattttaagaatccggctaaaccaggagtcgtaatgccagtggtgggaggtgaagatagctttaggacatcttctctgctctctcatgtttgcaaaacttgtttgttctctgaagatcccgccgttgcgagtggctctgtcaagcccaaaagtacatacgcattgttagattgcagccgtggtgcgtcttccggctatggactcgtctgcagaaagtagttaccaatacaaactcagtttgctaagaattacagatattaaaagtatattgttatgttttgtgtacgtataaaatttatatgtttgtcaaaataaaacagaggaataaggtaattaagaaccaaattctaaagaaagtaattgtaactcagttatttacatgtaccagattatctaatccttaagaaaaccattatatttttgttgtgctccaaatacgcagtaatcatttagagcctagcgtaaattgataaaaaggttatcttctatttgaacactgacttcaaaacccaacttaattaagacatcaaaagatgttaagcatcacactcttggatccggctattaatatatacaatgtacttttgttgttttaagatttccaaaagtcaaattaataaaatgagcagcttattgcagcaagttacaatgctcctaatataaggaccgataagtgtggatcacgctcgtgtggacgtaacttctaaagactttttctttatttttgaagtttcaagtttttaaagtcatatacatttcaacttaatgcatgtgtgggtgatgcccagataaggcacacaaacccggcaactcccgatctcaacgtgaagtaaaatagtttattttaaataaatttacagagtggcgtctacaaattcacaatcaacacgtttcttttgacaccagtcgacacataataaaacaggaagaataaactagacatg

SEQ ID NO: 636 - DNA, 82381 bp, Arabidopsis thaliana
gaattcagatcttctctgctccgatgtatggatctatcttttttaactattttgtcgggaaattaacagagaaagttttggttttaattatcggtttcgttgttttggaaaatgcaggatgagatcggaagctcttcagctcaagggtcaaactattctcggccgttgaagcgatcggcgtttaaatcaacggttgttgtttaactcacactctaccgtatcgtcagaatgaacggcgccgatacatcgtcttctccgatctttgcgatctccaaaacaagaagagatctcagccgttgattcctttttttttcttgtttaagtaaatcaccaccgttcagttttctgacaatactttgttttagagatgaggtagtttctttctttctttgaatgtcgtacaaaatcaaatcttaactttttatttttcttatcaatatcattattatgttgattttttttttgttaatctacgtaagtaaattaatttcgattcgtaagtttatgacttatgttatatgattatattcaatggatcaaaaggaatgggggagagattggtggcagatggacacaatggtatacacataccgtaaaaataaagtatatgatttgctttgtaatttcgaccactcaattgtggggactacaaagaaaatgaaattaaatatgataaaatttcgagagatttttataatgtaatgggtccttgaggttacattcattcgccaagaacattgaacctgtcatatctgccgcgtctgtgaactgtgtttgatggtccataaaatattgacacccccatgttttaccttataacgttatctcaccatgttcttcattcacatgacaggatcacatctttgttcaccatagttctttcgattttaatttaaaattttactcctattggtttcgtgtgtgtcatttgggtcctatatacatacatcaaaaccgtttatcccttcttttttttaaccacttgattctctggcttaccgaggaactggtgttgtgggggttggacagttgggtctctctcgaattaatttgaataaaacatgtggttctcatttaaactacatattcttttaacgcaaattcttatattgtttcaatttataagtttttatacgattccaacaaaacaaaacaaaacattcgaaatttaaactcattataaaatcgatataagaaagtagaaaatatttgttaggaaattcgctgggtttcactatcaacgcatgactagcgtcaaatacttcaaccattagtccatagttccaattcctaaagtcaaaccaaaaacctaacggatcagtctttatcccgtacgttgagtttgactattagattaaactacactaattaactacaaacctaacattcattcattttattcaaccataacgtaatttacattcacacgacatcgtcaattccaaatataataattcaaaactggaaacaggagatatgaaacttgtcatttgaaactctatgactggatcaataaattaaacatgcgagagtatagaaatgattttttgattagttccatatttggtagcttcctcatgagaaaatgtatgcatgagaatcgagaattgtcacaatacatatgtgaatttctcttctcttctttttgttcctttgtgcttttcttctaaattgattttcttgtcatgataattctttagcaaacttgtttttttttctcttttaagaaactttgagttgttagggaaagagaagtgcggaagagctctaagtcagccagtgtagatcacaataatgaaaaaggaacaataaaaacatcctctgtgcagatatttatctagaatggaaaccatgcaaagaggacagagttgagcatatcctttttaacattaattcataccatattattatgtgtaaagtgtgagtgacataaatgttgtaaataatctatgttgtaacataaatgttggaaacggatgaacaattagtatgaataattgaatactttggtcgatttgttttaagtgttaaaaaccaaaatagattccatcttttagtatctcatcggatatcaaattagattgaagattaaggtcataaccccaaaagggtattgtttaaatgtgaaagtcatacatggaaaagggcattgtttaaatgtgaaaatcatacatggagaattataagaagaacaaggactgggaataaataatccagaggagattccagagacttttcaatattgcaaaagatagcaataaacaaacacacaaacacactcctctgcacaaatccgttttgtttcatccatcgttgtacctacgaattccaaaagaataagaaaaaaacccgaaagaatggtcggtggagaccactcaaagttgaaaaggttgtttatattttacctgactgtgaagagggtgaacctgatgagatactaaggcactttactcatctgtaaaaggaagagggctcaatagttattcgctttggataataaaatcatacccagacaaccttgttttaattaattagcttgatgtcaaatatccttctacaagtgtcaacttgtaagagttgaaactaagattcacaagaggagtcaatcaagaaaagatcatgtacattttcttttgcaaacctaggctttgacaattcatagctattttgcatcatcttacgcacagttatcatatgtctagaaaagtgtataacaaaggctgtcttagcaatagactagctagatcaaacaaagagaagtgcttatgatttctatatcactctattctcaagtttttccctagtcaagttttacaaaatgccaccaaccagatattttctctaatttactgaaaaggagtttcgccaggaagcacaggagatttgtctcttctcttctttatcaagtcaagaattgtgaaactttgcttactattactccaaaccagatcaaatatagaaaagagtcaagagatcacccaaaaaaaaaaacctttcttggtgggggccaaacgcaattttcttctagactgagaggtatcaagaatattcgaattgaaacacaaccagttttagtaaagaagagcaaaagcagtgtaggaaaatcatgaagtgagaaaacgttgaagttcatttccatacttgctcttgcattgcagtgaaaatttccaaaaacttctagatagtcatcaaaaatggctacgaaatttaacatacactcaacaaagcaacagacacaaaaaaaatatggaaaaatcaaatacttttcgatactaaagcagaaagttaagtaaccggctcattcgtaaaaccactcctacaaggtgaaacagagtcgagcaaattaaaagtcacaatactctaatttctgaagacgaatcatagaaagatctaagttttacaagtttccatcattggcaatctctagaaaacacaaagctaaggtattcagaacaattccaaaaacttatgccaccaccaccaaccttatatagcaagtcaacgagagaaagtaatgaatggatcctaacctttgatgtgttcatgatgatcggaagcagcagcagcaatcttagcctcatgatcttcatcatcatcatcgtcatcatccctacgtgatttaacagtgacaatagcttccctggtagctccaacattcccaggaggagcaggaccatcacgatcatcaggatatctaacaacaacaacaggacaaacacaatggtgaacacaataatcactaacagagccaagcttgccatcacttcctctcttctcagcaccaaatcctctgcttcccattatcacggcgcttagattaagcctttcagtctctaagcaaagcctctctctcatatcgtgatctttcactatatggatcttatgaggaaacccagcttccttcaacggcttcgctagatccgctactttggaagaagtaaacgcatcgaaatcttcctgactaggcttcggctgagctccgggatcggtagcggcggaaggaggaggaggagtttggagagggagaggtccccaatcggcgccgaagagaacggaggttggagaaacgtggagaatgacgacggcgtctccgggacggatgtaatgatcgacagcccagcgaacagcgaaagcgctttcttcggaaaggtcaacggcgactccgatcttacggcgagcaccggcggttggggtaggagtagcggcggaaggagtggaggaagagtggtggtgagagtgacgaggagatgaaggatggtggatcttgatgttagggagatgaggataatcggaatctggattcatgatcgtcttcttcttcttctctgctttgattcaacaatttatagaaacttttgactattttccgatcgagaggaagatgatgatgatgatgaagaagagagagccgtgtttgtcagttttaattagtttacaaattaatttataagtgtaattaattgctaattgtttggataatggatgtattaaattgtcaagaagttgaaaattacgagaacgtgctgagcagctgcttattgaggaatcatagggaactgttttatcttatcagtttacttttataatgggccgtgtgttttgatattaaggcccatatgtgttttgtcaaacaatgactttatcagtatgtcaaatttgctgagcaattgttgtcgatcgtatttgtttatttgtatttttaaaataatgatctaagaccgaatctaactattttcaaacataagagttgtgatgaataatttttccgtaatacatggatttacggatggttctatttgcattacatccacaatgaataattttatctataatacatgaaatcacgatgaaagattgtacatacagtacgctataactttcaataacttggttttctccataataacttaggtttttgccataaactttgtgtagaaattttctttttagaaatattgaactactggatattgaactttttttggttagacttctatagtattgtttcctattctgtttttattttcggtgaaaaacatttaaactactaaaaaatcagtgaaatagccgttcagaaaaacattttaagttttaattaactatatagttcgatttttatccccctaaaaaaaaaaaaaaaaaaccatcgagttaatttttgcatatctgttttaataaatttaaacatctaactaattttagccgaactaaaatcaataaaaaagcatcccaaaaataattgataaaatttcatattttctataaataaacaaagcaaaatcaatcaacttataaaaagaagataaactcaaaattctcattggccaatttttaaagtagtttatactgtactaaatttataattctgatccaaaacaaaacagtacgtaccaaacacatgtataaattttataaatcgaaaacgaagctgtacatcccatatgctatgcaatgacattaattggaaaagctataaacaagagcaatttgatacatttatctcacaccagataacaagattaatcagatatgcatgacaccgtttcgaaaaccgaggattaattaggtgataacatgaatcatgacaggatcattgcctaactaaagaaacacaaaatggatacaagccccaagatctgacacaactttagagagagagagggagagagaagtttcatgacaacaattaaggaagagaacagaacatatatgtctgagtgtttaggttagaatctcataataaacaaccaaaagggtaatccaaaagctgaatctttctttcgactcagctctcagatgcatacaccaaaaaaggctctctcttttttttcttctgtttcttactttcatctacttaaaatgttttttctttaaagagacgattttgtttaaatcaatatagaaagataaaacatttaaagcttcaaggacaaatcaatggtattaggactgcaatcacctacgagtgacgacgttttagccaccactgaaactctttcaccatatttccccggaaaaaactcgtactccttcacacctcctgatccatttctagggtttccttccatgtagctcccaaattcctccattggtccctaaacccaccagttaaatcaaataagatcaacagttatatacatatatacctatatatgagtattaataaatggactatacttagtaccgtatgatttgttgcctcgttgaaataaggattaatagtagtactagaagcagaaactgaagctgctctagcgattctatgatcataaaggaaaccttggctcctctgatgatgatctgattgaagaagatactgatcgtagccgttcatcggaggaggaatcattgtgtatttcgaaaatccaccaccgttggatcgaactacattattctgatcaccatccaaacgtttcttctgcagttttttacataaataaaaatcaaaactttttcaagtgcaaaaactatatatatatcaatcatgttgatgaaaacgattaaaaaacaaacaaaccttgaagcaagtgtcacagcgattattggaagaagcgttaaacatttgaggatttgagattgaagagagctcatgagtagtggaggaggtctcaacaaaaccccatggagaaataaccgggtcgatcataacctgacccgacccgactccaccacaatagatcctgttgctcccgagtgagcttgggaagccttgtagcacaacacccgggtctaccggtacgggtaaacgggtagcgttgttagagatcgatgctactgatgacgtgtctccgactgtggcggcggcgagttgcttcttttcttcttcgattctctgacgctcgagctttgctacacccattcctctcaacgttggtttcttctgtttttgctgacctgtcttcgatcctggtttccgaccacgactcttcagtgtctctgtccggatctcgccggagctgttgacgacaagacgggtgtttctcagaagatcgtttgggtttccgacggagttttgatctgttgacatgaagaagagagaagtcgccattgatgatgatcttcttctcggaactctttttagatagagagagagaagggaagaggtaaagacgaaagctttaagtgtgtgtgttttgtttctgctctctttttgtgtgtgtgtatctctttagtgttcatatactagctcaggcaaagtacttacctgtgtttttattttctgttatttccaggtactatatgcggataaacgtatctttatttcttttttactttttaccccctatagtagattaaattaaagtatttttcaaaaagattagtaaagtatatcataaattcataatacgtattcttattttatactttcttagtcttattaaccttagatgttataaattcccttagcacttgcatgcatttttaacttatgtgtgtatagtcgtatagatgttcaatttgtcaatattagtgggtgtaagtcaagagacgttgaaaaaaatgcattatttgatgttaatatggtcatgaaaaggaacaactgaaataaataaaaaagagagtttgtaactgaaaactatgttatatagcatgaatgtatgatttgattgatgttgttatccatgcattggatcgtggaagaaattcaacattatagtatgatagttagttatctttggttctgtccattaaatggtattttttattctttctataatcttcaattactccttaattaattaacctacctcttaatatatagagttttgactaaataactagatatggaatactatgctgtacatctataatactagtatcggtgtaaagagtaaagtgggacgaattctcactttgcaacgaatatgattagtttgtgaaacagatcaaagatataatgatttatagtttttaagaatttaaaggagtaacaacagaacaaggtttcaaatcctttattttcttacatcttttgggcgaagaatgtagaaaaaaaacaaaaactcaaagctatttatttacttgttcctgataaaaaaaatcagagattgtgataatccctaccatggagacagcaaatcggagattgtcgctactcgcataggctcagtcgtgaggtgagaaacactgtccaatagtaacagcgcgtgcatcacattgcaaagaatatagtacccgcggatcgaggacaggtgtcgggacgttagaccattcgccgattgtagcgagcaaggtctgggacaacgtgattttactcagctcatatcaactaaaataagcaagtccagttacagtcgcagactcgcagttatatgtattttttttttcttcaaaaacaaatttttatttactttgactaatgtgatatgtatatgaatatatgataaatacgacgagtaagcttaaaaactcactatacttagctgacaaataaaatactaaatacaaaacgaaaattaatatatttgacatttatttgaaaaagttagctttcggtatttgaaaaaaaaaatcgagagatagttattgcttcacatgagaggaggacgaaagcaaaaagaatagcatgagagacgtgaattacgagaagggtttggagctacggagtagagtagaaatgatggctgcatcatataaggaaacattttaaagctgcctccatgttaatcttggcttcagcccaatacctactattagaaaattttaattatcttaatacaaagtttgttttatatggatattctcaatacaagtcttaagagaagccccactgaagtaattatacattactatgtgttgagatttcgttttttttttatataaatgaagtaaccagatgagatgttgtacatcttaaatggctattatatgatctacgtaaccgttgtaaatgtatactagctaataataaaacgtacgttgttaaacaaaaaagaaatacaaatatatttaattatttctccattatgtatcttattttttctagttatcagtatttactcgattccaaaggtacttcgaattacctttgctaagtacgttttctgagtaaagttatcatataacactcaaataaccttttttacccccaaacaaaacaacttcaatatgtatcttcataagttcatatatttataaaacaaattactcacttcttatactcaaaacattcatgagtgacatgcaaattcactctgcggttagcgagattttgttatacgtagataattaagaagaaaaataaaatctgaattaatcactggaaataaatccaaacggcatgaccaacccaacattgcaacatacctacactgttgctataagcctagaatgacacgcgagatgataatagaattacactaaatcgaaataaatcaatatcgaaagattttatttctaccaagtttaatttgttcaaaaataaatggaagtatatgctttctatttcggaaaatagctagataaactttgatatagataccgcgtagattgtattgtgggctaggacaaggaactggtagggcaaaggacgaaagaggggaccccacatgtgctttcatgttaagttacggatagtggtccaactgacacgtgtcatcacggggaccactttagatggtcattgggcggctactactagggttttttttccggcacgtgtaaagaagaaccgaagcgtgtgaaggtttgatttatattgctgggtttaggcaggcatagaaagattcttgggatccgtgaagcatattgtgttcctttctagaatgattggatctttctcttctgttttttttacttctcctcctattagatgatagagccaaagaaaataaataaatattattctctttggttattgcaaatgaaattatttatgtttcataacactgtttaacttagttcatagaatgttgttggctgccattttaaaagctctgcgaatcctcataatacaacctatcactccattttgatttctctttgagatctctctaatacaaattgatagtatatgcacactgtgaagtaaaataaatgtagacaagagactatatagaggacaaaaggaggcagagtaggtgaataaatgagtgagtttttgggaagtgtaaaaaagaattctgagaaaatgaaaatataagaaaaagaagaaaagatagtaactgttagttttggctttatacatcatcttccttatctatctattttcatacaaacttgcaaacccttccttaaacctccttttggaccacctctctctttccctctctcatcttattttttctttcttcttttctaagaatttaattttccaagattttctattatcattactttagatctctcaatctccaactgagattctctccctcccctcactcagtacagttgtagaccccctattcaacaactatactacagctttgcctttgtctctagattcttcaattctcaatctcaccaaaaccaataaacaagatatgaaaatgtgctcaatattgtttaattttaagtttagttagtatagtaacaattaacattattcttgatcaaacttacaagtataaagttagatatggaacaaggaggactaaggaagtacaaggtttttttttctttttctttctatgttaaaacttgaaagtaaagatttggaatggagggacaggatcagagacaatgttgaaatctggaccgtccaataggcagagacaaatctgagcaccagatattctgtgtccaagagtagaaagcttttaaatagggttttgtgacttcgtgttgtgagaaatgttttttcaatattaaataatgtaacaaaagctattgtcactttcacttgttagttgtcttgttcttcaacaaagacactgcaagtattactggctgcagtacaataaaatatttcgtatttgcaaatatgcccctatattcagccatgtattgcattctattaatctacataacttaagttttttcttgagaaggctacattcttgggaagtatgaatgaagcacatagcatccatttccctggagccacaaggcgtacctttcgcatcttcacatccacggctacctcagataaagcaatccgtatccgctgcaagtccaaaacaagttcattgagcggattaaacatatatcaatcattatattagctcaatcaaatttgaatagatgatagagtttgatgtggtttttcatccttttagacctcgtggaagtcgaattctggatcagaagccttggagaatccatacacatggatggttgggaaagataagccttcatctctgtgcctatcgttgtatactccgcgaaatgcatctgcttgagtaaagtattaatgacggttaagaggggattgtgagccagaaaaaaggaaacttaagtaggaagtatataagaaacctagagattcagcagcatcttttggtaaattcatgactacttgggtgactttttgacctttttcgcttgaaaacatagcctttatgaatcttcgtccgtccatgttaaagatctagacatagatgagaagatttataattctacaaatcgtttgaagtatgaaacaaggtgtttagaattcgcacttacctcaattctcttctcgagcttattgacaacactattctgttccataaattctactgcatgaggattcaggtcattggcatatacacgttttacaattcttgctgcagcaagtgcgataggaccaactccagcaaaaacatcacctgtcaaaacgacagcgtaggtaactaaacagaacaagacatagacaaaacttgaaacaagacagaaaagagaactccagactagcaataacaataatacaatcaatgtattatctatctggccgctacatatgcttcttatacaacggagaacagcaaatttcaacaccaataggagggacaatgcactttttaatgaggagatcagtggtgctaatttataaatggggagttcaatagagggcatagcaataattttcatgatgtatcagttctaagtagcaaacatacagacaacgtcattttggtcgaacccgagtagcagcctctgtctttctgtcccaagtttcgaattccaatatctagcacacgcaaaaaatgccaaaaacgtcaacttataagcagatatatcgctaaatcacatgatacgagatttggtaagaacatgttttctaagtcaaaagtagacaacatttctcctctgactgaaaactcaaaactgatatcagacatcttacacaaagctactttcatcaccgaattaagtagggtaagggctaatttcaaatggtaaatggtatttgggtcatcatcaaagcactcaataaaagcatgcatactataattggcatttcaatgagaaagaatttacatacactctagctaaatcaacatgaaagcgcagtccattttcaacaactagagtcaccagcgaatggtttccagctaaaacctctagctgcatagttctgaagtcattgtggataggatcaatcttattcacaacggtttgtatctttggctgattcttgtccaggactacctgaaaagaaacagaaaataacaactcagctcactagacttcaatttctgaagctgggaaaatttggttacagacttgagcaatgtccagttgtccactgtcacattaccttagctatgagccttttgtatggtagatgctcatctcttaggttcagatgcgcaatatgccccaccatctcaaatgccgaaggcacaatcatacccttaggtagtacagcctccaatatctacaacaacaacacactttgaagcaaaccaactcgatctgatcttcaagagaaaataaagtcagcttgaaagtctcatcatttacctcaatcattggccaatagtcatagaacaaagtcagtctgcatttcactagctcgaaacttaagcttgcatcagccattttagcttctgcaaacagaacctaccaaacagaaaccataaagattctccaacaacacaacataaactactggatcaaaccagatgagtggattcagagaagatttctaaccttgatagcctcaggcaagtcttgaacttcctcaccggaatatttctcatccaaaagcaacaatcttgttgaacctctccatcttcctctactaccatagccttctcccaataacccctcaaaatcctcttctcctcctcgagtttccaccacttccaccaccgccatttcgttgcgtctgcttgctatttccttttccttcccctcccttgttctctctgtcttcctcttcctctttggccgagaaatcttggccaagtttctgaatttgagatacccagttgaattaaatgtcctggcgagtttatctctatgcaacactgaactcaatctctccccatccccttctgctttccctcttattctccggttaaccgaatccacaacactatcttcatcttcttcttcttcatcagtctcacggcccaacagcttcaccacatcttcttcaatctcatctccaggaaccctagcaatgttccgaatcctaggccaattaagaagatgaccacggagacgattctcgagcgcgaaacaatccttcgccgggactcgaatcgccgaaatctcaaaaaccctagtaaattcatcttcattcaaaagaacatctttctcaattgattcatcaaactctccaattttgcctcgatgggcatctctgtctcgaccaattgaagctaatctaatatcatctagcacaggcttctttcctttcagaagagacgggccatacggaaaggtggtggaggagagattactggagaagacacagaagataagggttttaggtttgggatagggtttaaggataaaacgagcagagtaggaagagatgactggaaaaggaagtgaattggctcggaaaagagaaagctttgacaccattttctgattcactcagcttcctgatggatttgggttttggtgttgggacaatgaaggtcatttcccgcgtttgtgcatcaaaggtattactcagggagcatattagagatttcatcggcaataagaacgaacatatcactctgctttcagatttattttcaaaaataaattatcctaaaattttaaacgacgtcgtttcaataactaagcgtcaaaacgatgtcacattgacatcccaactagactgtttacaaaaaaaacaataaaaagggtttagggttttataaacaactagactgtttcatgcatcccaacatttatcaggaccaagattcgtggaatggaactttgacatactgattaactaaaaaagggtttaacttaaaaagaaatcaaatgaagtagcatgagaagagaaaggttaggataatatgagttgaaataaaaacaaattagaagaaaccttaaaccctattaagttataagtagtcacacatttataactgtacaaaagcagagtggaacccgaatgattatcacaagcaaaatatggacgatacaaagatcggttttcttttctttatttttcagatattagggaaattaactcaaatctcatcaggtaatttaaaactctgtgtaccaaaaatctgaagagaagagttctgaagaaagacggcgactccacatttgctgctgttgaatccatcccagagcgtaaaatgagcagtccccgagactggcttcttcggtgctacatctttcacagtgcacatcttttccatctttcttacaacgtaatcattcgacaacattcttccttcgttctctcctcttgcacagtcgttcacaagcccggtttcgtatattgccaccattatgtccattccgtctccgtctactttcattctcaaagctccggtgagtgatacttgcagtgtctctgaggttggtctctggaaagtcgcctggtaaagagagaaacaaatgattaatattacatgtgaaaatttcgacaaaaaacaccacttatgtggagagtgacaaagccaatgaagaagagtgagccacattgttctgtttagtcaagaactcattgagttcaagagcagagaaaattcatggttgaagtaaagtttagttaggtagctaatcctatgacacaatcaacaagaacatgtcgtcgaacaaaaatttatcacagatgttgtttagtcaattcaccaaaagtagctaattctaatgcaatagaagcttgctgcattcataaaactacattccctgtcatatatacctataactatctagaaagcaaccacattgaccacttttttagcagagacaaaatccctctaaaagcaatattactcctaaatgtctaatgatcattttgatacagagaaagagcatcagcgacctggatacagccctgtacctaaagagaactctttgatttactatattaaacattcacaagactcaaggacaagcgacactgcaaaccataggacacattttcctaacacagagtcagatacaagaacatgctcttgaatctgcaggcaaggcgcaagaatcagatacaagcttcacttggaatcctataatattctcctatatatttagcaccagaagacactcaaacaaaacaagacacttacattgaaatcacataaacaagagctgaaatctaccattaaatctaattccttcacatcaagatcatcacaatcaccacaacaatcgaatagtttacaatgttacgaaaactcacccggaaggctggagaaggaaacctaggcgcttcggagatagatttgagcagcgtctcctcttcgtttccgatcaattgagaacgaccttggatcacaagctgcggagtaaacatcgtatccagattcaacgcctctatatacgccttctgcctcaccgtccattggctcgatccatacggatctttccaccccttgtaatcccaataatccacatgaaacaccaaaaccatcgtcggagatccagatccaccatcttcgccacggatctgagcgtcgaaatcacctcgacctagccgggacatcaacatctccgccgcgggcgatgttttacatccctgagacgagaatagctggacgagaacgggaccatctccggcgggaatttctgcggctacggcggcggaattgttaccaccagagataggtttagttgaagatttcttgaggccgaaacaggcgaaaagacggcgcgacattggataaaattgttgaccgtctcttcgcctcctcccgaagaaatcggatataagaaagaaggaatgatctggagaaaaacgaatcagaaaaaggtgttttcccgagaaaatttgagaatgtctttcagagagagatcttcaggaggaagaagattaacacgtcgagcggcaccgagagaaacgcggcaaagtgtctttacctttatactgtacttctttttttaataaggaaaattctcaaataaagtttttttttataaaaatggaaaattatcgtattggtggaaaaagctgtagaaataaaaaattaaattggagcttttattatccttgttatacgggtcggtgacacgtcgggaaagacaggcgaatagttttgtttgagctggccaacgagtttatttttgttttcgtttaaagagagaattaaaaaaacaaatctttctcgtcctggcaaaaaagaaagaaagatttacttgccaacctcaacaattaaaaaaaaatgttatattgcttctttgtatattttttaattgagaaaacactttgacaaaaagaaaacaattaaaaaaggaatatatatatacatttgttagtttaacaaatttgagattaaaaagaaaaaacaactttgctagtgggaattaatatggaaagaaaagattagcttaagagacatttagtaaagatgtaaaaaaaaatacatgttaagagcttcaactagtcatacatgacattgtaaataaaacaaaatatacccacaaagttctatagttctaaaaaaaacttttaacttcaaaaataaaacaataatctaactttctaagtatagtttctgaaggttaaataaaatttgacgtccattttcttttcattgctgaaattcattttgaaataaaggagaaccacatatgtttttgtcccttcttcttcccttcactcgtttttgctcttgtaatcttgcttgcactttttctatggcttgttcaatcgtatccactcacattgtgttttccttttacaacatgccgcacaacagcccaagcttacggtaattttcttaaaatgatggcaaacaaccactttatgatcatataaatgaatatagatgtgtatatgtacttcatatttgaaatcgattgaatgatttggttttgaccacatatggaacggtccatgcaaatccatgtggctgataaaactacgacaagtaaaaaaaaagacgcttcatgtaagttccaacataatctccaccactatcttggagcttcactctcacacacacatcatcccatcatttttcagtatatatagaaatattaacatacaatatatacttgcataaactaacttggttctcttagatatttctttagagttaaataatcatattcaatttttttaaaaaggatgttagaagggaaagcagtaatgggtgatacagatatgaagcaaacaatgaaggaagatgctcttagtttggcctccaaagcccttgattgctttgatgtcaccgaacctactcaaattgcccgtttcatcaagaaggttcactaatcatatattgcaagttttaatgtgtattaatcctgactagacatgtattttctacctatacactgtacatatgtatactgaaatgaaatatgattatgaatgttatacaaactccataactagagtttcatgtcaatgaaattcaaatctttttgattttttcaggaatttgatagaagttacggatcggggtggcagtgcatcgtggggacgcatttcggatctttcgtgactcattgcagtggctgcttcatccatttctcagttggcagccttaccattttgctttttaagggatcagtcggtgaaccggcccccccggaccgatgctctagctaatttagacagtattgtaaaataatcaagtccttttcgattgatgtagtgttaaagttaaagagtattcaagttctttcactgtaatatcaatcatgattcgtcgttatggatgtcttcaataacaagaaaacactgctttctcaaattacatagacaaaaacgtctagaggtcaaaaactttatcttatgttttcattagagctgtattgtgtgtagaaatcatgtggttatagatcaattttatttagcttctgccttaccagccggttagctctcagttagtttgattaatatggaatttacatcgttaaacatcctaaaacctaatattagtattcggtacatgtgaacaagatctaagtttcaataacttttcttgcaccaccaattccgatgacgaccttcatcaccatttaaccggactcttgcctttgtctctcttagtcttgttttgtaatctttcttccatttctcaaatcttgactttagtctcctgagttcttctgcgtgctgcttcctgtttgagatcgagtctgatttcacctcgacaagacttttcggatcttcgtgaattatgacgcttcgttgatcaaattctgtagaaagattattaacgtcactcaagctgcccttaagctctttcgtgggggttccaaaggacattgtgtcttctgagtcagtaccgtgacttgcagtcttgtctggagccaaaaccttacaggcagctgcgagactcatctgcaagggcatgtagatcataatctttttatataaggttttggtcagaacaaatcataagcatgcgtgacgtcacttacctgcattgacgacatatgcttttgccatgtgtcctccattgacttcattcttgtttcgttctctaaccatctttcctcaaatcgttgcaactcctcctgcaatgcagtgttttcatcttccttctgcattatagctgcttcgactttcagaacccggctctggagatcagcaagaacacaaggttggacctcaaactgctctgaaagaagttcctaaacaagagagataataagtttcagcagcggataactcagagacgcatacatcaggcaaaaatactaccttgtcttcggaaaccctctttgttgactttcttctcgtttttttcttctcattgcgaggtttgttcttctgttgcgtactatttaagagtttacgagccagccatttgcgtaccactacagataagaagaagagctgtaaattcttatccaagatagaataacaaattcatgatgccataggagagacaatgttatttactatattgcaagtgtatagctgcatcaagctctttagttattgctgtggaaacaatagctgattctcctaccacaatgtagtttctcctggcattttctccacggatatctgtagcaacagaatacattagccatgaaatcaaagagacaaaaaattagcatataccgtaaaactatttatgaagaaatcatgggatatgtcagtgatttatgattacatgactgaagtatcactgcagcattcctcatattgtgaaagtattcacgagtctgataaccacgaaattgcttctgtaatccaagtatgccacgcaaaacatacttttttctttcctcaaggacgctaatctatcaaatatgaaggtgaaggcgatataattttagatggatcaggaaatcaacataatatctacagataaagagaacttactactccagttcggaggtatattttcgtataaccaacttgatacatttcaggaggaagattgcattgtttcaaaatagcttttgatgtgctaagtggatcctgggagattcttgtgtccagcagtaggcatccatatctactccatgaaaaagccaacaacgacaaaagcataagaatgcatgggagtttggaacaatagatctatcaacaaagcacatcgataaagttgagagaccaaaccttactgcaagctcctggtgtgtcaaccgcgtaggatatcctgatcttgatattctaacaatctccaaaacgccacaacatctaagctgttgtagaacatgattttcttcgtaaagtccaggaagctgatttgaatttggttttatgcatcgaataaaatgaggagtagtgtcttctaacttgttcatcaacttgaaaagttggccctgtaaacataaagtgagtagatatactgatgaaagagattcttgtgagaaaactttacgaaaggaagatttcaaccaaaacagaaaaatgcataattcaagccttgtcaccttaaacttggcaatcacactttgattcatggagtccgaaaaggttgccggctttagaaaatcgtgatgcatcttagtagaaaacaggttcaataattgacatttgcacaatgataaaagttggataagatcaacatgcagcggatctctgttcttttccaggaagccatttgtattatagagaacctattaaacaccataatgtaaagtgagatgtttgttcattttcttgcaccttcataatttgacagatacatatcacattagaactattcatgcagatacgttgttagatttggggtaacaactgacctctccggcataatgcttaattctgaaaccccgacctctctctcccttgaaacaagagttagcattcaaatgctgcttgagcttgttggcaaacgtcgtatcagttgcctttggaaaatttgattcctcatttaatagcgataccaaaccaatgggtttctgcaaaagatgtgcgaaatggttttctaaaacatgtaagaaaaaaccttaatgtcatagtttggagcaaagcattatacaatccctttccataaggaggaaagacaagatgagtaagatggcacgctacaaaacttaccttctcaatcagatttagacactcttgattgtctatgaattcgaccttagtccaatcaattccatccccttcatattcctgaacagcgaagatactttcattaatagacaatacacatttatttgatatgtgtagttgaccagaagtagagttacacatcttcatataatgaggctcaagagtcaagagtaagaagatcacctcttgttcaagtttaaatagatgtcggttgaaatgttgctgcagtctttcatttgcatagtttatgcaaaattgttcgaaactattatcctaaaaccacgaagacctgatccttacacaatcaaaagaaattgagactataaaacctcgagcacagttacgaaccttaaatgactcaaacccatatatatcaaggatactaatagatcttcctgtacgtgagttaccaacttccagtgaaatgtttatttgctcaacaagccagttgaataagctcgcatagatgattttcgccagagaatccctcatatcagttgcctgaatatatagcaaagcaatccgcacactacctttagctatataggaattacaagtgcggtataatattgcagtgcttgtaaaaaagtaaacaaacctgtcgcaatgtcagtcttttagcaatgcaatctctaccagcttggagcttgcatgtagacaaaaccaccataagcttttttgagttgcagcccattaacatagctacattagtgacagctgtaagaaagcaaaataataagcatcacctatattatcatagtagatcacaaccagtctactaattcaaatgattaatgacagacgattaactctaccttcatctgctaccacttcgacatggttttcattgtcaatcacttcaaaagatacatttcctagccataacacagctgcaagcagtgcaaatgtacgttcttggtattcttgaggaatttgaacaatgttgaaagcttcctataacaacagggaaatcttttataaaatatgaaattaaaaaactctagcatatgttccacggaaaacagagggaggcactggaaatacaaaaaagtaccatcagtttgtgaaatttctgagcatcatcagtgcgatcaatggttaagcaattgctctggttcaaataattgtattcacttgctgctttaatcttcaatctctctgcaaacaaaattatataataaatggtctagcactagcagcttctagctactcttagccttgagcaagtaagctaatcagtaaattatatatgtctacactttgcttcagcagggatacttccaaagaatctcatatgtagctgaaagattgaattcctgcattagttcatagatatttcggtttaaaatgttacctttaagaattggtgaagctcctgcacacaattgataaaagatatggtagcatctctcgccattgcacagctgagccactcttgactggtccaaagagactactaattagcccatgaatagctagcaagtggaactggctataaagcttctcaacagaaaatttaccttttctaggagaactatggtcgttcagcacaagtagtcacacaaacatggtgagaaaataataaaagacgtgagctccatagtcaagaaaatatgacaaacaatcatacaaatgttcaagtcttacaagtttcaagtttagctccgcatatctttccctttgcactaaaatgaatctccatcagtttaccctgcaccaattcagatttactattgaatccaaaccacttctcaatttacggctgacaccaaactttcaaatttatacaaacgattttagtattcctatgaaaggaaaactttcagtcatgcaaaaatttgaagaaaaaaaggatgtacaaattactcacgaatcggctagagttatcatttcttgatgttttagcattcccaaaagcttcaagtatacaatttgtctttaggatttcattttccaccccaaagctacctccaccaagagcttccaagtactgcattgcatattttgctgtctcagttttcccagctccactttctccactaagaaataatattttattcatttgattgatgatatgaatatcagaagtcaccttcacatatgcatagtcaaattatcagtgcacaaaaagcattcagaatagaaagcatcgtaccttatgataatagattggttcttctcctctgcgtaaagaaaaattcaaaaatgtaaatgcatacaataactatctcaacaccaaaaagggagaaagtgtatgctttcactcacctctcatcatatcatcataagctgcatctgccactgcataaacatgaggagcatccaaagcattcttctgataagctgatagaaactcttctccatagatctggacattcttaaaaggatttactgcgatcaaaactggccctgctttactctaaaacagaaaacattaaaattatgttatatacctctgctacactgaaatataaacgaacaaaccagaatgtttttaacttacataaatcaagtcttgtgagtatctgacccggaggttgtagagaagagatggctcattcaaataactaagctgagtaaggtcttcaactccttctaaaatctctgggttagcagggaaaatctcctccattgctactttcacaaccttagataacacaaaactacagcataaggccttttccatatcctaagaaatttcaacaatctcaaagaacttcttacatcgtcgttagcggacagcataacacacacatcatcactagaagaagtagaatgtatcttccccaagtgccactgcccattagcagcaactcgacaccaaacacaaagtttctggcataaaatagatgcaatgtaaaaactgtattcttcttgtcattggagaaactagaaaccgcatactttagtttaaaacaataatgaatcactaaaagttcaaacctttcagtttctcctcaatgatgaatatagaaatacaacataaaagataacacaaagaagcaatcatttacctccctgacgaaatactcagcgctattgatccattcaggatcatgcgagttcttcgctcgactcatctgagcagtactaatcttcacaacttcatttccagttttctccttctctgcagattgtgtgatctgctcagtgctccaatccttgtcttctttctctatggttttgctttccagcgaaattgcattacgaaacttcgccggaagagattgacgaatcaacggcattggagccctgaaagtagacggagagggaagcgacgaagacctctcgcttgaatcaagcaggcgaagagactccaaaatttccttcactgaacttttcatcattgtagtcggaggagacgccgataaacctcaaaatccacccaccaacaaaaattcaaactttttcgtttttgtcttgaatcaatacccattttcgcgtaatgtgagttccttaaaagccagcagaagaatctcgaaaccagaaaatctgaaaattttattgaataataatctctctcaacattgtaacatgtaactagaaattcaagaagggctaaaaataataacactaaaaacagcaacaaacctcaaataaagaaactgaatttcgccaaggagaagccattccaacggaatacataacataagagagagaatttgaaaatacagagacaatgaaactctaattaggtagatgatgatcatcatcgggctgttatttatttattatccattagtggataaatgggcctttaccaaaactatgggcccaataagtagacacgaattagtaaattgacccgacacagagcattaggtgaaattctaaaattcgattgatttccgtctctctactctcgttgctttgcttcgtgccgtcgtgcgtctgacctaatcagcaatgacgaagaagaggaacaagaagaatagagacgaggaagcttccatggacgtttctgaatctcagagcgtctctgaagctactcctcaaggtagtaaagtaaattcgcgtcttggtttggtacatactcgtttcttcatctgcttaagattcttgtttgatttttgttagtgatggacactacggagaccggtgacgggaaactagcttctcgtgctcgtagcttgtaagcttcttcgaaagtctctagttgtgtttatattacataagtctctagttgtatttctcttggtcacaagtttccaactttccattgtgaattgctttgttcttgtcctatgaggttggacctggagtcatgtaggttgctactgtaatggtttacaagcagctcaagtttccacattagtttagcacttaggagaccattatgcaacatgttgaatgagagaatctctgactagttcctcttgtaaattggtttatcatttagttagatttatgtactaaggcgtgaaattcttaaatttggttactttagaacatatattataccattttgatcggagaaaaagctccattttttacttgttttatggtgtctttggatctccttactttgtgttttcctttaatcctgatgattttcttttttttaggatgagcacgaggaaaggaaaaccgatgaagagaacgaagattgcaatgaatatgaaagctgtggctgtaggtagtaaaatagcgaattcttttatcacgttttggtccatattcgtttcttcatcttcttaagatttgagattcaggtgtttactcttttgatttttcttctttggtttcgttagccatggacactacggaaaccggtgacgtgaaactagctacggaaaccggagacttgaaagtagctacggaaaccggatacctgaaactagctactctttctcgtaacccgtaagccttttgacaattccgtactcttctatagaacaattgttttgagaccggctttagctttgtaatattgatttctcgttagccattcgattagtagttttggccagttatggactcatggttctcacgggaaaatttgtcaactagctaggtttacattatttaagtctcaggttcgttagaaatttccattgggaattgctctgttctggtcctttgaggttggacctggagtcatgtagtttgctactgtcataacacttagaaaacatatgcaagctggtgcatgagagaatcttggataagttttgcttgtaaactagtttatcgttttgttacgttcctcaagtggaatgtaccaagacatgatgattatattggatagttttagaacatatgtataccattttgttcggagaacaagctgcattctggcttatctttatgttttctttggacctctttaccctttgctgtcctctaatcgtgatgatatttcttgatttctataggacaaacatgaagagaacaaagaatgcaaggaagatgaaagccgtggctaaagctatagcgttgagcgagaagtatgaagcgaaagctacaaaggacaaaaccaaaaccctcagaactctttcggccaagaaattgtacgagtgattttggttaaaaggctacaaaagaaggaaaacagttataaatttttgatagttcgatttgtctattttggtcttgttaacgtttatgttttcttctagaaagagcttttgcaattttgtaatctccttaagttatcgacctatagaagttacgagtgcttatggattttgaccagatggtaaaatatattctttagcaagactggttttcttaacaaatttccaatcttcataaagtcatatctcaagtaacaaagaaacaggcgtacatgcgagactactacttttaacattaaacaatcattcaaagatcaaagtgtgataacaatgtcaaagacatatacatatgggcgtgtattctatactacttttatatccaacaatgagctctttacacaagatttgttgtctctaccaaatcaccttggctcggtctactgaaatatatgcgctatttcgcattgtcagtctgcatctgttacttctgcttctatgtctacgactgctgttgaggaaccctttcctgcacattcaaacacttaatctcaccatttgatatacaagagatatggttacttgatttgcgcagaagtaaaacaaaaatttgggtaagtaacctttcttaggtttagaagaaaacccatttaagtcttgtccaaaagcagtagtttggttggagaatttcactggttccttaacaaacttatcatccacgactgcattttccacgataagaaaacacaatgctaaatgctttgaaaagagatatacttagataaattggaaaaaatggaagaatcatcttattacctgagaatggttgagtacagaaagggcaaagctgaacttcatcatccatcgctgacctgcagacattttgatattcaatcaagctcgatttggcgaaacaacaaaaacaactgagagggatttgattcttgttatatccttacttgaatatctgaaactcatttccacaattaggacactgcacaagcgtaaacagagagatgaaaaaccgcaaaaactagctaagtggaacatactcttgacggatttactcaaaacacaagtgctagctagctaacttatagtcacgaaactgaaattcttgaaatgcttttttaagctaaagagacaagtagacttacattgctctggacaatatctcgttgtgcccaccaaaaaaaggctcccaaacccaaaattggaacaatcaccacaatcagctgcaaaattgtaagaacttcagttcaccagcacaattagataaccagagacattaaatgattaagactttagagagatagagagagtaatacccagacagagacaatagcatccaaaatccaaccaagctgaccagtcatagagagataagtcaagccaatggccaaagcaaggtttccgagaatcctcccatttccgttgttatctccaccattaaacttcaaacccctaaccctaaccacccgtcttttacggttaagagatttctcactagctagcatcccaatatctcccagacccatcactcgctgtctctgtctatgctcaatcaagcaagctctcaaccccaacttggtttggagcatagaaggagccaagctccgtcttttagcgtgtaatctgttactgggttccttgttgaaaccgtcgtgtatggagaagttacaaaggataatctgcggaatcgaagccatcgtctgaattttgatttcccaaacacaaagctcgagttgagaaggatccacttcaacgacaaatgatatttcacgacaatgctgtgttttaaggttatattgaacattaacagaaactagagcatcgcggggatagctcagttgggagagcgtcagactgaagatctgaaggtcgcgtgttcgatccacgctcaccgcatttttgttatttgtccctactttaattgaaacgcgtcgtttaggaacaacaagtcttattttattttatttttaattcacttacttgaaacgcatcgtttttgacgcgtaatgaattaaactgtttacctttgacttgagagatgtagtagaaaaactttaagatcttcgagaacagacttaaattcatgttgcattagagtttgatgaaaaccgattgattttattttattttatatacatgtattaagatcgagtgtaatagtatatttgtcccatgttcattttttggatgtatatacgacttttagaaatttatgcgttctcaacaaaaagaaaccatcaaaggtagccctcttccgaagaaaaatatttgacttttatcaaccttataaactaacaatcgaaaactcatcccaacacaatcttctaccttcttctctaatccatatagattccacacttcagccaaaaaaaaaaaacgaggatggaggtcccaaaatcctcattgctaatgataatttttgtggtagcttcatgtttcttgcatgtcaaggcttggcatggtcagacttattgtggtggcaatgcgactccccgatgccagctccggtacatcgactgtcctgaagagtgccctaccgaaatgttccccaactctcagaacaaaatttgttgggttgattgctttaaacccctttgcgaggccgtgtgtcggggtaattatttaaccaccaatttctttttgtaattgatgatataccaatgcagtttaaaattagaattaatagaatttcatcattttgattaattttagattttgaaaatatgttttaagatttggatatgatcttttgtagcggtaaaacccaactgcgaatcctatggatcaatttgtctagatccgaggttcataggtggtgatggaattgtgttctacttccatggaaagagcaatgaacattttagcattgtctcggaccctgactttcagatcaatgctaggttcactggtcatagacctgctggccgcactagagactttacatggatccaagctctcggcttcctctttaactcccacaaattctcccttgagaccaccaaagtcgccacttgggacagcaaccttgatcacctcaagttcactatcgacggccaagatttaattatccctcaagaaactttatccacttggtaatcatagaaactcaaattttaccctatcatttttgtaggttgcgattgtttcaacttttaaacgtcatctttgtctattcgtttagattttcatgtaaacactcattattttaatgcatattatcaggtactcatccgacaaagacatcaagattgaaaggttgacagagaagaacagtgtgatcgtgactatcaaagacaaagctgagatcatggtcaacgtggttccagtgaccaaagaagatgatagaatccacaactacaaattacctgtagatgactgttttgcccattttgaggtccagttcaagtttattaatctgtccccaaaagtcgatggaatcttgggacgcacttatagacccgattttaagaatccggctaaaccaggagtcgtaatgccagtggtgggaggtgaagatagctttaggacatcttctctgctctctcatgtttgcaaaacttgtttgttctctgaagatcccgccgttgcgagtggctctgtcaagcccaaaagtacatacgcattgttagattgcagccgtggtgcgtcttccggctatggactcgtctgcagaaagtagttaccaatacaaactcagtttgctaagaattacagatattaaaagtatattgttatgttttgtgtacgtataaaatttatatgtttgtcaaaataaaacagaggaataaggtaattaagaaccaaattctaaagaaagtaattgtaactcagttatttacatgtaccagattatctaatccttaagaaaaccattatatttttgttgtgctccaaatacgcagtaatcatttagagcctagcgtaaattgataaaaaggttatcttctatttgaacactgacttcaaaacccaacttaattaagacatcaaaagatgttaagcatcacactcttggatccggctattaatatatacaatgtacttttgttgttttaagatttccaaaagtcaaattaataaaatgagcagcttattgcagcaagttacaatgctcctaatataaggaccgataagtgtggatcacgctcgtgtggacgtaacttctaaagactttttctttatttttgaagtttcaagtttttaaagtcatatacatttcaacttaatgcatgtgtgggtgatgcccagataaggcacacaaacccggcaactcccgatctcaacgtgaagtaaaatagtttattttaaataaatttacagagtggcgtctacaaattcacaatcaacacgtttcttttgacaccagtcgacacataataaaacaggaagaataaactagacatgaagatctcaaacacctcttcgttaatgctgttttttcttgcggccatgttatgtttcttgcgagccaagtcacaaggagtttactgcagcaacccttaggaacgatgcttccaaaagtacatactgtgtccgcaagaatgtcccaccaccggtgccgcaaactctatgaacagagtctgttacgtagagtactctgcaactccgagtgtcgcagtaagcgaaaatgcctttgaactttttgtattaagctttttaccaaattttgggtgttaagttattcaattcagaacttaaaccgttttgtgcaaatggtatcaacacataaccggtgtaaaaatattggtaaccatttatttttctctccgttgagaaacattacacatttgtgggccgtcaagttggatcaaactagtccccagtcgagcctttttcctttgtggaatcctaagcctcaccgaatcggtaaaagccccatataaatccctattatttacatcaattgccactctactatctccaagttttttttttacttttttcacccatcagtaacttcacatctctctcattgcctaaactcgaatgtttgacccgaaacaccaaacccactcgagctgtacccgaaactctgagtcaacccgctcgagttctgctgccgattcacatgcccactctccgcctcaccttccgccgctcgaaacgcatcgtaaccaccgtaactcggtaatccattggtcggagctagctctggaattggattaagacctgccaagctagcccaatcaaagttcccgttaagaatcgtcctgagcgaattcatccgaggaagattaaaagactggtcttttatctccgggaacgaatcaagaacgtcgtcaagctgtgatgaagaagacgatgacgacccattcgtgctatgctcttcacgacaagcttgaacaggagtaacagcttgtctctgagatccagatgttttcttgtaaattcgacacaacacccaatcatccaactgtaacaaagaagcaaactttatcagattttgatttcaattttaacgaatttggatctgggaaagtttcagtctttatttaccttggagcttccatggctacgagaatgttctattaagcgatactcgtgcataatccagttggttttagtgcctttgggagcttttccggcgtaaaagaccagagcttttttaatcccgacacgacgaccatccgccgtgataattttgtcagtacccgttgctttccaataacccgacccggctactctattgggtcttgacccgttcggatatttccgatctcttgggctaaagaaataccattccttctctccaaacaaagccttacctaaatagttacaattatactccctttagttttaacattttctcaaattaaacccaaaagtatgacaattgaaaataacaccctacaaatgtgaaacatgtttgcttacttggcaaatcccaaggatcgaacttgtagagatcgatgtctccgatgacctggagagagaaatgatagcctgcaactttccgacatagatactgaacaagaagctcttcatctgtcggataaaatctaaaacctggtggcaaactcaactgggctaacggatctttctctctaacacccatttatactcttctacttcgattcctcagcaaccaaaaaaaaaaagatttcaagtttcgaactctaaaaacccaaattatatgtttttgtttttatgttcgtcgatcttttggacaatatagtaagtagttggtttatataggctacggaaaagccaaaggttcttcaaggataagtacggtcgtccttgtcttactgttctaaaatctaattacgattttctttgtggacccgtttaaccatttagatactgccacgtctatgaactggccgaccttatcgatgtgttgtacaatattttccagcgatataaatgtgcaaaaaacacgaggaaaattttctcatgagtaagaaatttgtgtactacgattatgagaaaagtccgctgagtgattgcagtaatttattttttcttattccatcgtgacatgtaaaatgtctaaatatttactagaaatattctaattatagtaagtttttttccactgagaaagcaatgaagctttattatttctatattcgactatattggtgccgttcgggtgcatgaaccgtcaggaaaagctaaagtttatcgacacgtgttaagccagttgtcctttcttctagaattttgatcaaaagcctaacaacgatgtgtatcaaaatgctccaaataattagaggccagttcgatatttagtttgtcctgaagcactcgatcactacatagattggagtcagaaaaagaaaagaagaagcactaactatttgacagataaatctattgagtaaaacaaatggcactaagacgtttttatgaacaaaagagtattaatcagacacgcgtggaatgcattttcccgtccgtgtgaattgtacacgtgttgggagagttaggcaagacttcaatataaaagaatcaaaagagacaaaaaagaagaaaaagtaataataaaaacagcagaaaatattgaacaagtgtacaaactacaaagttctaactaaaataaattgaaaagatacgttaacataagacacgtatatacagaacactaatagtatgattttaatattttttagttaaagataataacatttgagaatatatgatcgtttgtattataccattaagattatctcacaaatgtagcaagtagtctctttgtttttgattaaaggataaatttcaagttttgtcagaacaactaaattcgatttttatatatatttcaatgattatctcataaaagacttatttcatatattttagtttatatttaaacaaaaagaggttaattagggtttcgttcactcaagaaatactagaaatggcctaagaagttgacaagtgaatatttggaccatgctgaacaggtcagagaagcctttttatatataaacatgtgacgcgattcaaagaactcgattcttcttcttcttgataattcttttttttttgttcttaattattattattctctacaaatcgttttcaattgcttttcggatttttagattttagtgaacgtggagaattcttgttcacagagagatggacatgcccacccatttcttttgtaagataataatttctgaatatcagcaaagatacgacaagtttggttcaacgattcgcataactgcaaaatgtgttgataagaaactcatcaatcgctattcaattagcgtataatgctcttatgatcctgacaaaaaaataaattaagagatatggttttgatgacaatgaggtaaagaacagattgccataatctaaacttgttcaaaaaattcttcaatgaatttattttattttaataacatttttctacttttttttcaaaaatacattttaattgacagaaatttaccacttttgcgataaatatcgttggtgacgtttaaatcattttaatatttgtttagagaataaataggtagacttctatttaatgagttctaaacgtatattatatatggtcttttctaaagtatgtttttctctgccaagttacatgttggttaaagctttaaaagagataaggtgatcacgaaggtttaccaaaaagaaaaagagagaaaacaaaaacaaaaggcattatgctttctaaatgcatagtctatatatgcactctacatttgtacataattaattcgacaatacttatagtagataagcaaaatctggactacataattaattcgacactcataattgatttagtgatgactattccattctgaattttagactcttctaaaattttgtagatggtagcacctaatctatatagagatcgatgattcttagacccttttttaccaatgaaatgtttaaatagttcccacttcaacacaattcttccaaaaatgacaaacttcaacatatatatatatatatatatatatatatatatatatatatatatatagttttaaatgaacttaaaaacataaattggaaaatggttattaattaagaagacaattctaagtgtaaaatagcgatctgtagctgcaattgttttctgaaattgttgaataattattttgttcgtatatatgatgaatagcgtacaacatacaaaacaatcagctggtttatatattaaaaataaaatgagaaactaagaaggccgcaatgggtaccagcgactaattaattaactttttaagtcctcttcctaattttctttaaacagaaaaattaaaataattttattatctcatttatgtaaattagagttttatgttttctcaaacgcttgatgtcttgttttttttgttctttaattttatttataacacataaaaacgttactttgcaagaaactacaaaaaaaattggctgaattttttagggtattgtctggaaaccaagttaaatcattgttcccctaacaccacttattgcttgaagtaatctcaaataatgggttatgtgatcatatcatttggataggaggcttggaagcccatagaccatagtacgtttactatatatgcaccacaaattcgtcagcagctcgaatacaatttcttcatttggtttttggtttatatcagaatatgactttttaaaagtgatcagataaaaccgcgtgagctaaaaatgtctttagatgtacgaattaatgaagactggaatgataacgtgtaaagtgtgttggactgggagcgcataccaataagcaaacatgaatttggctttgaactttccttttatacacacacagaacatgttcttcacattatactacttagattctgatataacttggaccacttcagccggaccaaatcaatctctcaaactataattgatttaacaaaaaacaataatgcaataagaacttattgctgttatacattcgttcttaattactcaaaaaagttctaaaatcaaaaacaaataaaaagtggagattataactaagtaatcagccagatttggtcttaccaatcctcgtcaaagcgatataagctataactctataaacaacaagcatcgcagttaaagctaaggcagagactaatccactattaaaccctatatgcttgataccttcaaagtcaccaacatgacacctcaatttcccattatcgccacatggatacaactcattcgccgtgtactgacccaatatcagtagtttatatgtatagtaaccgattgatacgtatttaatccaagagatgaacactggtacatgttgaacgtagtatcctcctgctaacaaaaacgtgagcattatgactgacccgagtgttgtggctgacttctggtccataactagggcacctagggctagccctagcccacccgagacaaggacatggacgaggagtaccaaaagggtcacaaaaaagtttgcgaggttatggtttagaccggccatccaatatgtgatgacaagaaaacaagttggtaatataagctccattggtagatccccgactactcgggacaggaagtaaggcgagagcctgtacatccccgaagaacgttctttctggagcattgctcgctcttgaggaaatgtgaagatttgttggaagagagggaagaatgcccaaaaggatgagataaagaacaacagccctatctgcaacaataaaccacaagtatggtcacctcatggatatagacaatgatgtagacaaaagtgtgtagttaaagctaaaatacctgatcttgtaatcgagaaattttcgtttgccaccaaagaagaccacagaggaaagagacgatgaatatctgagcaactttcatgccagagaaagaatcgtgacgcctttgcttaaggcctctcttcaaaagaacacaaaactgctgccaccacgtcgttggccagtctccataggtattggtcgctacacgagaactctctcttggtttgttacatagatcatcttgtcctttaacctcattgataacactgtccaacaggtttgtcttgtaaaacgcaactagagctgccttcatagcctctggtctttgggattcatctgatccaacacctatagaagtataatatatccatgtgagattcaacacggagacacaaaaaactataatatgacggcttacttggccagcaagatatcacaaggagaggcttaccgtttgcgatgtccaagagaaaatccgagggattaatcctttcgactaagggggagtatccaacgctagcaaaataatccatagcattggatccaagcccgaagtagaccggattaccttctgaaaggagcagaagcttatcaaacatatagaacaacctactagaaggttgatgaattgtagtcacgaccgttctcccaccacgagccagttcccacaaaatcgacacaatcctttgagcagtggtagaatcaagcccagaagtgggctcatcaagaaagagcaaactagggtttataagaatctcttgccctatactaacccttttcctctcaccacctgaaacacctctcaagaagggtcctccaatgatagtatccttacatctgtctagacccagttcagtcatgactgccttagcttgtttgatcttctcttgttttttaaaagaattaggaagcctaagaagcgcagtgaatactagagtttccgtaacagtcaagttagggtaaagagcatcatcttgagtcacgaaacccgtagttcgtttcacagctttggataatggcttgttattgtaagatatgttccctgtgagctttcctttaccttccccaacccgtcctcctaaagccgtcaacaagctggtcttgccgctcccggagggaccaagcatagccaagatctctcccggtttgacgatccctgttaagcccttcaagatggttcgctcctcggttttgtcattctttccgaaacagccttgtgaatccttcagcttcaccgtgtacacaaggttctcaaactgctccaaaacatcaagaccaagattgaattaaaaaaaaacatcaaaacaagattgaataaacaaggttcttgaaagattatttaatatatatatgccctaataatatgaaaagttctcaatactattaatacacaaagcagcacttttaacctaatgaaccacggtgtgttctccatgtatcataactaaaaagatgcatataataattataaagtatgtatcaaggtgataacaagatttatctataaacaaacatacctttaaggtaacaggattattagcctttttgaaaattgaaaaaggaagagatcgatcatcgttggtcttcgcgatcggggtttcaacatccatagaaacctcttgattatccatccccaacaatgatcgatctataaagctttactctcagataactaaggattaaagctgaatcaatcgaaaggaaatcaaatatttgctcttccactaattaaggaagtatttgttgaagttgaatcgagaaggagaacaattgctaatagtattttattttgttggcttagggagttctaaagacagaaaacaaaactaaaaaactctaaagtcttttatttagctaaataaatagaaattagggttcacgtaaggcaagtgagagagcgttttaaggatatatagaaggaagattctttagagaatgcttctgttactaagcacgcttttattgtgggatgtttgtttcgattggccgaaaaaaaaattaattagaaatcaatctgagaatcttctatttgctattcttttattttgctttttagataattatatattattcatacaatctttaattgcgcttttgtttcgtccaacgattggttaatatttaataattaatttattattgataacctagataaaattaagcattgtaaagttaagttaaaaataaagatatttgagacgaatactcttttacctctataatttatttatattagtcgtgtgcataataaaatacgaataacagaaatctttatataaatttcaaaaacatgataccactagatttaaatatagaaaaatcctaaaccaaatagaaaacccaaatttttagtcaccttgaaataataggaagagaacaaaactgaatggcaaagcattaaggagatgtaatcaccacttacgaaatcaatggtgggggattcgcaagtgaaacgtaagaattgagcacgcgatcatccactaaaaacgatatttaagtgctcatgactgatatggacgatgaagaccctccatcagaccatcgcatttactgctagccaacggattcatatttcacatagagcattgtgattcgtttttttaaataaaaatattacaaacatacagtgattgaataattcaccatcggataggagattatggttcgagtcttcccatcacaatttcaatcattaattgttggttaactagtaagaatattcagtttttccacacattttggagattataagttaggattctataatttgatccgagtactcatgttatcaaaaaagaattgttttataaaaaaaggtgcaatcaaatatagttgcattttacatatagaacgaagaagtctactttgaggggaatatggttgcattcagtaacattttttagtgaaagtttaatcgtcagtgcttagaccttttccactgaacgaaaaggccttaacctgcattttctccactctcatatgagattcaatttgtatggaaactaaaaatgtaggtactttactcttacaattattaaagtttaattggattaaaacatattatgtagtaatctcctttcaagttaaggattaagtttcaaaaaaagaaagtccaagcgaatcctctggatgagacagagagttatgaaattacatctttaaagaccgttagctgagtcaacttccggtggttgcaacccccacacataaaataagaaaattggtccaaatattgtattgtcactctcgtctacagttcaacgtacccctcacaaaaagctttagccataactagtctcaagtatcgagtttattatcgaagacattagtgagattgcaaaggaaaagaagtggaagatatgatagctgaaacgggaatggtgatggtaggtgttttgggattatgggcacgctttgtccgaaaaccgctccttcaattcaccggagaaatgatgcaagtaatctccgaagtcgtgtcgaggatgtgtcaaccagatacaacatcttatgctactctttcttcaactgctaattaataaccctcctcccaatatcgtcggaaggtgataacatatttaaatttagagttacatataactttttttaaccttgttatttgtaggttctcgattctataatatatacgtttttcgttttcttttgaatgttaaaattatggatcaacaaaagaaaagttatatacctggttttgtgttcctctctcgacatatgatatatatgtttacatgaaagcttaaccgcaatagagtactagtgaggcatcatagaggcttagtagatctattttaggcgaagctgcacgacatcagtaaattgattgataatcaaaggtttagaaatcgcaaaaaccatatgtgattagaataacgacatcggaagaagatgtgttctcgggttcatgaagctgatccacataaattagagcacgtgtataaatgagtctcgttataataacgacatatatatgatttattcggtttgtttgattcgggtacactaaaattaggttcggttcagatttggttttgattttctattttggtgttaccgtttctgctaagatcgttgattgtctgcttcatttgcttttacttcgtccacaaagttttacgagaaaggttggcacgggacttacgggtccccattgacctggttcatatgtggttcctagttcaagtcgtttgatcttaatttcggctactttttataattaattatttgggtttgggctgggccatgtaagcccaatataaaaacaaaaaaacacacagtttcactaacgacgtagaaccatggaaaattttactcatgggcctatttgcttcaatcatctttcttttttgtcacttcttgatgccttgtctcttatttggaccacaaaatatctgttgcagcaacaaaggaaaaaaagttgtaaacgtttaatttgttttctgtttataatgtaaatgtaacaaaatctcaagaaaagtaataatgaaacattcgtttctcaatatcctttgacaagaagtataagaagaaaagtagctacaattgatcaatcacgtgacccacattagtattaatcacaatacttaataattgcttataattattacaaacacaacttcactgtgactattcttgagttggttcttcctacaagtggttatatatcttttgacgataatcttgtgatatgaattaatgaagcatatgttctaactaacaatggaaaactttctggtgactacccactttaccatcattaatgattataatttccaaccttacactatataacgtatcaaacagatagcaaatttacattttgcaattattaagaacttcaagcacttatcttgtgcaataaggtcgtcgccccattctcaacctcacatggttagttatgaaatcatttgtgtatttcgattgtctcccctccaagctaagataaatcataattactaaacatcataaaacctcacactgctatctttgcagtatattctactattatctttatcttgagtaactgttactatcatttgtctctcttcgtacccaagttttgacatgtgacatgtcaactaacactttcacttccaacaaaacacttgtttattcaaattcatactatacacttctcatataatttacgaacattttctgttgtcgtataaaatatttctatacaatttatgctgttttcttattctcagtttctcaccatacaatactaacagtaatagaatatgtgtctatcggtgaagtgggtgtgtcggcgtacataacgaagggaccaaattgatcatttattaaatatttaatcaaaagaagaaaaacaaaaagaatcaaaaacctccatgaaataaaataaaatcctctctcttcttcttcatgtgaatgtctgagtttcaatgcatgtgctcgctcttggatctcaatcgttcttctacagctttttcttcactctcttctctatcccttagctgtcacgaaacattctctttcactcttcccttctctctccccaaaataaatcagaaacctatcaacattcttcaacagccacaagtaaaatttatagacatttctgtctgaagaagaaaaagattgaatttttttgcttgttgtgggttctttaatggatccaagaacaagacttgactatgctctgtttcagctcacaccaactagaacaaggtagtttagttggtagattctttttgtttattaccatttttgtcacagtcttatgttgatgattctgattctctaaattttgttgactctctgtattaaagatgtgatcttgtgatattctctggtggtgagaatgagaaacttgcttctgggatttttcaacctttcgttacgcatctcaagagcgttagtgatcagatttctaaaggtggatactccgttactctccgtccttcctccgttggtgttccttggtttactaaagtgacccttcagaggtaaagtctcgctgtctcctaacaaagtttaaaactttatgtcatgaacactaaaatttgattgttttgtttccgattttggggaacagatttgtgcgatttgtgactactccggaggttcttgagaggtctgtaacattagagaaggagattgagcagatcgaggattcgattcaagctaatgcagccgccattgccggtgaagctgaaggtatgtttggacatagaatcagagattttcaaaattggtaatttaacacatagaaatataaaaatgttcaatcctttttcaacattgtgtaatcttgttcatatgtaggaaacgagttgggtggtacatggacttctcaaaagtctacggctttatcaaaggtgagtttttttctgttcactctcttagatgccaaaacttgagttattgcttaatgtttcaattgttgtggactctgtgtatgtgtagacgaaaggggaaactgatggagacactgtggaagaaaattcgaagtaagttttaagtagtgttttccctgttggtcttgtgagttgagtttactgtttctgtgaagttgattgatcctgataagggtgaattgaatggaatagggttggtcttcagcgtgttctggagaaccgtaaagcggctttgtgcaaagagcaagcgatggcttatgctcgagctttggttgttgggtttgaacttgactacatggatgacctcttttcgtttgctgatgctttcggagcttcgcggttaaggtatgtagctaaaccattcatgtcgttgtgttatttgtaagcatttgtaacgaaattatgaatgaacttgtgttctttttgcatccagggaagcgtgtgttaactttgtggacttgtgcaagagaaagaacgaggatagaatgtgggtggaccaaatcactgctatgcaagcatttcctaggcctgaattaacgttcatgggtgactctgggatcgtactcgctggtgaagagaatgatttgttgaatgctacaaacgtaaagcatggaaactctatggatgcctcgagccagggtagctttgagactggccaaggtccttattaacattaattcttatttattcattagatgatgcttgcatttggtttcttttcggttggtaactaaagctgaattaactgtattgtgcagaagggagagctcaaatggcaatgccgtggccaaaccagtttcctcagtacatgcagaactttcaaggacatgggtatccgcctccttatatgtttccggggatgcaaggtcaatcaccatatttccatgggaatatgcaatggcctgtaaacatgggagatgtggagtcaaatgagaagtcttccaagaagaaaaagaagaagaagaagaataagaagaagtcgaagcaagatgaatctgccgagccaagcgataattccagtactgagaccgaatcagaagacggaaatgaaggaaagaaacaatccaggaaagtggttatccgcaacataaattatataacttcaaagaggaatggagcgaaggagagtgattcagatgagtctggagaagaagaagggtttgtggatggagattctattaagcagcaagtagaagaagccattggctcagtggagagacgtcataaatcgacttcacaccgtcagaggaaacacaaaagtcacaacggtgatgatgattcaagtaacaaggaaactaaggggaatgataattgggatgccttccagaatcttcttttgaaagacaatgattcagagccagaagaattactacgtatatcatcaactgcgttaaatatggcgtctgaagttgtgagaaagagagaaccgccttctgatgattcattcttggttgcaattggaaatgaggattggggaagagaaaccagcattgagaaattcaatgcaggtgagaatgttcggataataaggaaagggaacaactatgacgaggagatgttgaatccgggtagaagcgatgaatcaagaagctattcgcaggcagagatgtcggttcatgatgggaagctcagaaccagaaatgaggcggaagaagactggttcatacgtaaccaagctggtccagaaacagatccaagtcttgtcaaaacatttgtaggagaccatttccacttaaataagagcagtgagagagatgtcctgaccgatgactctttcatgatccattctcgtgttgagaaccaagtagaagattctcggttaaggacagaaatcatggacttagacgtttacggaaccacccaacaagaaaacagtgccccggagaacactccgcatgaaccagatgacctatacatggttcttggacgggaacaagatgttaaacctacattgttaccatggacccctgaaattgactttgagactaacactttggctcaaagaacaagcagaatcgatttgataactgccacaaaggcctctgcaggtgaacaaaccttagatggtaaagaaaagaagagtcgtggtatctccaaggggaaggatgcaaagtcaagagcatcaagtagacctgacccggcgtcaaaagccaagagacctgcttggggaagtagagctgctgtctccaagtccaaatccgagatggtaagttccgtaaccgcttttcgtctttcttgattagtttccttctctcatctggatttggttttttgataggaggaagagagaaagaagagaatggaggaacttttaattcagaggcaaaagagaattgcggagaagagttccggtggtagtgtatcaagttctttagcgtccaagaaaactcctactgtgaccaagtcagtgaagagctcgataaagaatgagaagactcctgaagccgcgcagtcaaaggctaagccagtactgagaagttccaccattgagcgccttgctgttgctcggaccgctccaaaggagccacagcaaaaaccagtaatcaaaagaacatcaaaaccttcaggatacaagacagagaaagctcaggaaaagaaatcgagtaaaataggtcaatcagatgcgaaaagtgtggaactttctcgtgacccgagtctcgaaatcaaggaaacggtggtggaagattcacattcttacttgtcagagaagcaagttgatgcacttcctgctgttgcttctgttgatgatttcaaagacattaaagaattgcatagcttgccatcagaagaaacggccagagtaaagaacagaccgaatgaaatcatagcagagaaagtacaagatcagacgaagatcgatgatcaggaaacagtgaagaatacatctgtttctgaagataagcaaatcaccacgaagcattactcagaggatgttggagaagtccaggcttcacaggaaaaaccggtgtctccaaagaagtcggtgactttttcagagacaaacatggaggagaagtattatttctcaccagcggtctcagagattgacatctcaacgccacctgctactgaagcagatcattcgaggaagaaatggaacagtgaagagacgtctcccaaggcaacggctaaagtcttcaggaagcttcttatgttcggaaggaaaaagtaaaaccgacgttggaattcttcttctccggcatcatcgaacctttgttttgagacgacgtcatgttgagttcagttaaaaagcctctcttattctttaaatttttccttgtgtgatattaaatactgtttttcattttattgttgttatcagtttgatttgtctgtttatattacatttgttgatgtgttgtttatagcattgaaagtgggcatttgagtgtgtataaaaaattggtttggtgagttgaataatgtaagaatcttttgtatttttctaattaaactgtttatgatcattaggagaacaatatatggggatgtgttggaatcatgaatcgtaggttaaatcctacaagaggaaaagcttcaggagacagagaagatgaagagaagagaagaaaggaagaagaagaagaagtcgtgacaaagaaagtcagctaatagacatatctccgctatttaaagtcgagtctaagcctttatacacttaaaggttgagggttcgaacccttgttatgtctttttgccctaaaagaaaaaaactttctcatgaaattccgtgagatgattcttccattctaagcatttggttctgttagattgataaagaagtctcctacagtaccaaggcaatgtgccatccatctacaatttgtataactatatcttttggtaacatgttcccatcaagtgggaatctaattcccctgttattcttttcacgttctaagcatttttcaagctgtttaccattttgaaacttagtaacgatcaaaaagaataagggatttcgtcacgtaaattaaatagaatctgtatacaggtcatttaaaaaaatattttagtaagatacacaggcacagctcaacgtctgatcttggtttgtcataaacagcagagaattctaccacaaggaagctctggtactatctttctcattaagcatccgcgactacaatattccccaatttattaaataaacttttccatgatgcaaaagtaccttttattaaacactacgaataaataaataaaggtgaaacacccatttcaaagaaatggtaacgtgtctttttcattaggcgagactagccaatctaagcaaacagagtcgtctttatatctaaacgaacattttgtgaaagaaagagagactaaggtgaatccatggcgtccaagattgtctcagccatagtatttgtgtttaacctcattgcctttggtttagccgttgctgctgaacaaagaagaagcactgtgagtcacatctccacagcgatatctaatttgaacaagatgataattatgtgatctatcttaatattttggagttaaatattttttggtggggcaggcaagggttgtgcaggacactgaggtgcaatataactactgtgtgtatgactcggacagagctacagggtatggagttggagcctttttgttctcagtggctagtcaaatccttatcatgctcgttagccgttgcttctgttgtggaaagcctctcaagcctggcggttcacgcgctcttgccctcattctcttcattgttagctggtttgttattataactcaattagtacatcacatatatatccctagcttaagctagcttagacatatctggcgtttttatttcgttcaaagatgattcaaaactcacaatcaaacatttacaatagatcttagtttatagaactagaattatcattaatctatcatggtatcaaaatcgcagtaaatcttattatcagcttacacattttcattctcttttcaatgcacagttaataattcaaatctaacatgcgtctcttaatccgttatgaagctaaacgtgcttattaaacaaccgacattgtgctaatatttttacaacttgaatgttgttttgttggcgaaaaaaaggatgttcttcttgatagcggagatatgtctattagctggatcggtagagaatgcataccacacaaagtacaggacaatgttcatggacaatcctcctgattgtcaaactctacgtaaaggcgtctttgcagcaggcgcctcattcgtcttcttcaacgccattgtctctcagttctactatttcttctatttctctgctgctgaggcctctctttcaccttactagaggttcttaaccaacaaataagttttattttttttctctctaaatgtgctatttgatatgctaatatcatattttgaggtgggttttctatgtacaactatgatgaaatgttacaactatgacaaaattatttgaaagtgatggtacacatgagatttgtagatttatttgtatggttattagatcgagttgaaatgttgttttaaaaagagtggatgtaatttgacgattttgtgacatatgacataatgctcttattcattgaataaggtttgagctattctcgtgaatgcgtaaattcaaattcgtataatgcatacttttgacagagtaacaattgtttattactggagaaacttatccaaacatgagaacgtccataacaactagtagcaagcaactagctctatctatctccttctcccatgccaaagggtatggaatcccatcaacaccaatcagcaatcaccatccctttattgcaactgttccatttgttaacccaaaaaaatagtttaaagacattaaaataaaatatctaaggagaaggaaatctaattctcaaattctcattggatattaaacgacgacgtggcagatacttagttcaagataatgctatccacacatcttcggtgacctctgtggggaccaatcttcctttgtccgaatatctcatttgctagtacataaacgcacatactctctttcgcaaaatatccactacgatagttttcttcagcaatcacactctctctttgttcgagtaccaacaatggcccttcaagctgcttctttggtctcctctgctttctctgttcgcaaagatgcgaagttgaatgcttcttcatcatctttcaaggactcgagtctttttggtgcctccattaccgaccaaatcaaatccgaacatggatcttcctcgttaagattcaaggtacagaacaaatctacatttctaccattacagtgtagattagtatttgcgaatggttagtaaatggttaattgattatgcagagagaacagagcttaaggaatctagcaattcgagcccaaaccgctgcgacttcaagccctacagttacaaaatccgtggacggcaagaaaacgttgaggaaaggaaatgtggtggtcactggagcctcgtctgggttaggtctagccacggctaaagctctagctgagacagggaaatggaacgtgataatggcgtgcagagacttccttaaagccgagagagctgctaaatccgtagggatgcctaaagacagctacacagtgatgcatttagacttagcctcgttggacagcgtgagacagtttgttgataatttcaggagaacagagacgcctctcgatgttttggtctgcaatgctgcggtttatttcccgacagctaaagagcctacttacagtgctgaagggtttgagcttagtgttgcgacgaaccatttgggacattttcttctcgcaaggttgttgcttgatgacttgaagaaatctgattacccttcaaagcgtctcatcatcgtcggatccattaccggtattgtctagaatctgtataaccctacattgcaagatagagaatgattttgatcattgttatgtttgtttggtttagggaacacgaatacattggcgggtaatgtaccaccgaaggcgaatctcggtgatttgaggggtttagccggcggattaaacggtttaaacagctcagctatgattgatggaggagatttcgacggtgcaaaggcttacaaagacagtaaagtctgcaatatgttgacaatgcaagagtttcacaggcgtttccatgaagaaactggagtcactttcgcttcgctttaccccggttgcatcgcctccacaggtttattccgagagcacattcctctcttccgtgccctcttccctccctttcagaagtacatcactaaaggatatgtctccgaaacagagtcaggcaaaagacttgctcaggtaatatagaagatagtgttgtttttgtagcttgttaatcaaggaaagacttttcttgctgtgtactcaagccatagagttttgtttgatcaggtggtgagtgatccaagcttgacgaaatcaggggtttattggagctggaacaatgcttcggcttcttttgagaaccagttatcagaagaagcaagtgacgttgagaaggctcgtaaagtgtgggagatcagtgagaagctcgtgggcttggcctaataaacttgaagtctgttaaatttgatgacacctctcggtaccaatcgaagaaatctagtgaatttccgggatttttagatatctgattctgttgcgaagtttttttatccttattagtgtctgttgagtgtagattgcttggcgagtagcccacaataaagaaataaaaatggcgaatctttagctttatttactctgtttttcatcgaaacagattcagtaatatatactctgttttttcatcttacatttgtttgcaaaaccgatattatcaacttctcagtaacacaattcgttcctgaaagagtgcaaaaaaaatgttcctctacaacaccagaagtgttaagagcatcaatcatacactgaaggccaaggattcatgatcacaagtgttaaaagtttattgtctgacttaaagtaagaaacagaacattaaaagctttattattcacagttttattcatggcaagcttaggaacagtccataactaagatgaaagcggagaagaagcacaagtgcgaaaaagaaaccaaattgaaagtgttattaaaagtattcagagagaccaattggcttcacttcctcgacgagggatactgttaacacgattgtacacatccaccttgaagttggcaccgcatagaactccttcactgtctaccctcggcatcgccttgatcttgttcattggatgctcaaagctcattaaccctccttcactatggaacatacaccctgccaaaattcatcaaacacttcactagttacatatctcattccatcaagtacatacaagtctttgtgttaccaagcatatcaagatctcagtatcacctgtaggaaatggagcaaaagatttagcacaaccctctttgataacatccaaatcatctgatataacaacagatccatcagcagctatgccccagtatagcttcacccctccatcagatccctacatgaattacatcaaattgacttattcaaatctttaaacattgaaattgagttccaacaggcgtggactgattttgtgaattagtaccagagcagtgaagacagagccggctttgctatcataaaccacaaaggaaaagctaccgtctaagtctttgacgacctgatcagctggataaggacctctgtctctaagagtcctataagcttcgatcacaaacatggcctcgtttgttgtcttggtgagaccatactgtttgtttagctgacacagattgttcaagctcccaaagaagagacagtagatgtcatcaaatccacaaaacaacctaacaaaaacagaagattaatggagcagaacaccttaaaacagaagaagattaagcaagatttgtgtatgtgttacctctggtggatggagaaggaagcagagggacgaacgtaagcaagaacagcagcttgtccgaaagacatggagaaagtgttgagagggtaacgtaataagaaatcatttagggtttcttctggaagttttggttgtttagagcatttctcagatgccggactgttgagttcctccggcggatgagcaaacgcctcgtggaagatagccaacatttctctcctcctttagagaaccaaaaaaaatcaaaaatctaaatggaaaagagttgtgtgtcgctgtaataagaatctttgaaggaagattgaagaaagtggcagagtaatatatatttgaagcgttgtgttgtggctagttgttttagtcctccgctgtctgtttttcttcttttcctgtgggaaggaaaaacgttttggatgcgatcatgagactatttcttctttagtatttattaatggacatattattccaatttgtctattatcttattcatcatctgaattctaaatttggataaagatgatatgacataataaagctataaatgtaacttttaaatatatttttttcttttttttgtcggaacgtaacttttaaattttaaaaaccaacagaatagtatcataaaaagtatggaattttttaaataaaatttatttcaatttaatgtttttttttttcctcgattcgaactaatgttttagattaacaaaaatgttggtattttaataggtttttggatatcgaatctctggcgtattatttagcgggggaagaatgggaattggtggggccgtgaaagagagatgtcagtgtcacgggataagcattctcgtactttcatgtgttcttatcttcccacttttgtttttctgcatttttttccggataaaccccttatccatttcatcataattgattttccttggtaactttttttttatgccatgatcatcttttacttcttgaacaattaaagttttgtcttagcggcctaattaaaaaatttacattgtcatatagccacttaaactctatatgaaatttacttacttttcatatgagaacctttagtagaactaataattcctttttctgttttttaagttttatagagataaatgacttttatgtgtgatgtgattcccgatactttgatgggttcccatgactaaacagtgttgcattatattgttgcttcatcctcatcattgtcactggcacatttgttaaaaaagcttatcttgaattttccatgacagcaccatgatcggcccaataattatatccatatttcacttttgggcctaatggtcctataatcttatttagtaaattgattccatcctgctttgctctaggatagtactaaattactactgcatagatagacgtcaaattattgcgactttcagttttgcaaaaaacagaacaaacaaaactagcaccagagattcttgaaatggttgactaatctcggggtaatgagacctcctaatagtagtttcataaactttttttattttttcataaactttttattatacaaaatggtttatgttttcagcatttgacttactaacataacaacaacaaaaataagcctgcttcaaattgtttaatagatctcgtgaagtcaaagttaagagtttttcacatactgcagtcaaataaattttcgactatctaaacaatgtactaagtgtaatcagtggaaatcaatctttgacataaccaaatttcaaaagttacattgcatgacttcttttgtgtttctagtatgcatccaaaagttacattgcatataacttgttttacgttggacacatcaccgtagatgcatggacgaggattttgaatccaaattaccatataataattcaagataagtcacgtccaatatcatctaatgcaaatttacaactagtaaccaattaaatagttacgaaagataagcaaacacacgtctcactctcagccctatttgtgttttcatgtctcatctcttttaaagttcctgaactactagccttaattaaaatatacgttaaagactctatttgaaggttctttttcgccttttttgggttaattattgtatgcaatattatttttgtaaatgaaaatcaaggtctgcttatctgtactgcacgttccatataaggacaaccacagatcacgttgcttacgtcagcgactgtacaaaatgctggaggcccgtcacgttcgtatcgcctactttcgttgaatctaatattgttcacgccaacgccgattcatatatcatttcatttagatgccatgttcacttttatatcatatatactgttttcattttcaaattcaaattcataaataaaatctaagttaacaaagtggttagtattgtagactatgttatatatatgatgatgcttcatttgtttaattgtttgtttccaccatccttataaccaaactgatggtagattagtagttatatatatgcacatactacacatgcaaatgtaaagactaaaaatagtatccgttttcctaaaattaattatactgtttaactggtaaacgcaatgattagttggtccgaataacttaatgaaagcatcatagaaaaaaaaacaaaggcttggaaacataaagccaacatgcaaggtcactgaggttttataaataacattgatcgacaatttgttatttagtgaaaacgtacaattatcagtgaatattaattattatattcgtacggttctgatcagtgtcttagattattatcctttacttaaaatatactcgatctaccagtgacgtcactgtgcaaagtcacactggtcagatttgttgatgtaccaccttcatctatgttccttttgggctggacctgtcaatttgtagcttgtttactgaattacgtacttaatgggcatgtgaacataaatttttaactagattatccaacgtttcatagattaagctaattggtgtacttcccctatacttctgttaggttttattatagtgaccaattagtttcatttgcatatgatgactaatcgttttactttacttccttttcttaatgttaagtgatatgagttccaatttaaaaccacttaaaaatcagtggcttggttcatatcctctatatattattgtaaatcgcatatcttgtcctgttgtccactgtggaattttaaaagtttaaagataaaacaattatgtcagttcgtgacatatagagagctattcagataatcacattcagcatatatatactgaaattccgagtaaaaaatgctgtaggcaaatgaggttcacatgatcacttacgtacatagaatcgaataatttacagagaaaacacaacacattgcgaaaacaagaaggtcgagaaaacatattttgtattaaagtaagtacttggaaaacacttggccaggaaaaaaaaaaaacaacagtcaaacacttggccaagttgttacattgcgtgcaagtacgatttgtttatatgtaagaattggaaagcgtattttaatggggcgtttagttagggtcgaaatatgaaaacaccatctatgaccaaaacaaatcagggtcaagctagttttaaatctgcattttttttataagaaattgtttgtaagaaatcaatagtatataaggaaaatagacttggtgtaacagaaaaagttatttaatcaacagaggtgagaaaaagtgtttgatagaagatatgatgcagaccaggtgccattgccagcatgttgcattgttggacttgaagtaaccgagtaagtagataattgaaacgtgtcttataattgtcattaagggtcacaccacaaaaaggtttttgtgattattaaggtcataattcccctcacaaaagttggaaatataaaaattgaaaaactttggtcatatctaatctaatctttatctttggtttggttttatacgatcatcccgaagaaacatcatataaacctctcccatatcatacctacaaagaacatgcatgattttaacttattttcagttgtttcttctagtgggtttgagaactcatcatcaattgtcgtcatctgtttgctttgtgctcttgcatgcttacttgaatgagttataacaatagagaactttttagttttattttagcaacaacacttgaaagtataacttgttctactcgatttcataataagtgtgtgtgagatcttttgattactactagagactagagttgcttttaaaagtgtaatttttatttttattttgactcgatatacttttcaacaaaaaccaacttatatttttcttatcttttaataaaaaaagaggtatgatatgcattatcaaaggatctcctaaacttgtctataaaagatctcacgaggcggtctctgatcaaaacatcgtacaacccatctctttttttttttttaacttgtcttctctctttccttaactttgatggcactgtcccttctctcctacaacgtctccgacctctgtctcggcaaacctcctcttcgttgtctttcctcctcttcctcctccgtatccgacgccatcgctgccctcaaatcctctgaagacactttcctctccgtctggaattgcaatcacgacgatgacaataacacagagtgcgagtgcttggggaaaatatcaatggctgacgtcatctgccacttgtccaaagaccatgaccacagtctctgtgccttaaactcatccgtctctgttcttctccccaaaactcgttccattgtcctccatgttcaaccatcctgcaggttctttattcttccaaactctctctgttttgagggtctacataaaaattcaacctttagttgtgcttactctgtttctatgctctgtttttttgtaatgttctttaaattaatggtttttgtggggttactctggtttgactaatcagcttaatagaagccattgatctgataatcaaaggagcacagaatctgattgtcccgatacatacaaagccctacactaagaaaaagcagcacaacgacaacgtttcggtcaccaccaccacccactcgaacggacaacgattctgctggatcacacaagaagacatcattcagtttctcctcggattcatcgccgcattctctcctttgccagcgatgtccctctctgatctcggtgtcatcaacagcacacacacagttgttgcggtcgattaccactcctcagcgtccgcagttgtctctgccgtatccaacgctcttgccgtccaaacctctgtcgcagtggtcgacggtgagggagatgacccttttacgtctttgatcggcgaaatatccccgatgacattaacttgctgcgacgagacagcagctgcggcggtggcgacgctctccgctggagatctgatggcgtacatagacggagcaaatcctccggagagtcttgttcagatcgttaggaaccgtttggaggataaaggattgattggtttgatgtcgcttttcgattctctctcatcttattcgacgtcgtcgggttattcgtcggaggaagaagctccagtgagaacgacgtcgtatggacggtcgatgagtagctcagcaagaatggcaaggaagtcggaggcgatagtgtgtaatccaaagagctcgttaatggcagtgatgatccaagcggttgctcatcgagtgaactacgcgtgggtggttgagaaggatggttgtttcgttggcatggttacttttgttgatatcttaaaagtttttaggaaatttttggagaatgacatgtgaaaagttttttaaatatattttcttgtgttttgtcgattactaaaacccaacaaaaatgtgtatttaggggtgttttgtttgtttgttttgtgttttggtgatgagccggttggagtttgagattaactaaaactgaatcaaacgtttttggtttgtttagttggtactttaatagcaatcaattgatttgctcattttgtcaacaaatagtgtatatctttgaaacgtttttagaccatctccaatgtattttcattctaaaataaagtaagtggggttggagatgtctttagtcttgctatatttttttaatagcttcttatgtttattacatgtaccatgatgaagtgttgtaaacttgatgctagtgttcttgctaggctagggctatggaaaggtatgaaaaactttagaatgaacaagcttattttctcagctaaggacgaagattttattggtgaggttttgaggccacatgtttggaaaaatgaaatctaattttaatcggctaagataaatgtagtaatcctcatttggaaaatgaaatctaattttaatcggctaagattttaacataatccaccgagtagttttaacttttaatccgacattagtggatgggaagatatttagatagaggcattatccaattattaacaaaacaaaaaactgcccccaccgtcgttgtctaaaaatatattatattaaaataattggcaaagacgaagacgaagcaccctcatctccgtcgtttgtctttaaaaccttttgccattaccatcttcgcacgttgaatatacgtcgactttaaacatcttccaatctctgaaagcccctctcttttctccatttcgtgcttcatcatattcgtcgtcgcttcggtaggttcttcttcatctctcttcgattggattggattggattctatttgagtaaatttgttgttggttcgttgatcgcgtatgtcaacggattatttagggttccaccaatttttcgattcatctgtgctagtcttctggaatttgaaaaatgggaattggatgggtttgaaattggaattctagtttctcccgtattgatttttgctggcaattatgctgatctagattgttttcttatagctggattgttgttttgcatatgagattctcgcaatctctttgaattgcttaagatttgaccacaagtctagtatattggatatttgatttttgtaatgttctctgattaatttctcacatttccttttatgactgtgctctgatgacattttatgtatgtttgcatcgtgaacagggtcttacctctcatggaagggaacttcttcatcaggtctgatgctcaacgagcacatgacaatggcttcatagccaaacaaaaacctaatctcaccacggctccaacagcaggtcaagctaatgaaagtggctgttttgactgcaacatctgtttagacacagcccatgatccggtggtcactctctgcgggcaccttttctgctggccttgcatttacaagtggttacatgttcagttatcttctgtctccgttgatcagcaccagaacaattgccctgtttgtaaatccaacattactatcacctctttggttcctctctatggaagaggcatgtcttcgccttcttccacgtttggctccaagaaacaagacgcactgtccactgacataccccgcagacctgctccatcagccttacgcaatccgattacctcagcatcatctctgaacccaagcttgcaacatcaaactctgtctccttcatttcataatcatcagtattcccctcgtggcttcaccacaaccgaatcaaccgaccttgccaatgctgtaatgatgagtttcctctaccctgtgattggaatgtttggagacctggtctacaccaggatattcgggaccttcacaaacacaatagctcagccttaccaaagccagaggatgatgcagcgtgagaagtctcttaatcgggtatcgatattcttcctttgttgcatcatcctttgcctccttctcttctagctctctctctctctctctctctctctctctctctctctctctctctctctctctctctctctctctctctctcttcgtgtatagtacgtgatgtacataggctgtaaaactcgaatttactgtggtataaccactactgcagacaccgttgttccgagttaggtctcaaattgcaggccaatatcttgttgtgtattacaaagatatcgataaaatgtgcttgtatctaatcttcatgaacccatgactatgtttgagaagcgtatgaacactttatcatctaatttttccacctgttgttgagttacctgttttgtatcagagtaaatttatttcccttagtccttctaacaaaagatgaccctgagtttcgtgacgaagaggtagaaacgctagagggaaagatgaagggaattggattattattctggcttagaaaatagtgagaaatttccataatgtttgtcagtttgcagaaagaattatatagactaattggacatggatctctaaagcgcatatgaagcctatctacattgcctttgagtcaatttagatgtcaaaacaagtctgctaacaagcacacgaagcctgttagctccaggaccgggcttgatcttcgacggatcaccaaccctcgagcattttggttcccctgcacaccaaccaccaggcgtgaagtttccgttacctctaccgagcagctctttatcgatcttatccaaggcaggatcattgtgtctgaacttgcgggaaaacgcacttccacttgcaatcatcctctctgtatcgttgatggtgagcgcccgaggatgctgtttaggagggcggtcccatgagatgaaatgcaggtcgtggttcagcacagtggaagagtactctggagcgttgcagatgacagtatggaaatatccttccggtgtagagaggaaattggtgtaatacattagaagagtccgtggaagattgtcccatccccaaatgcaatattctacgaacgaccgagataagaccatccaagcggaacctgcagtttcacagattagtcaccatttttcataatcattactcactaatcactgaattaccggtaaatagtttgaatgcagttggcattgttctgcgaggtgtaacccagaagacatctgacttctttgtggagtaaagccccgggtctatgatcagcggctttgctcgtttttctctgcgaaaaaaccgcatttggatgaaaacagaactaaaaatgtctcaaatgtactatacagagaaataatcattactctttccagcctagtttgctactgtggtcgataaagttgaggttccggtccagtcccgagaatgtatcaatcagatctgcaagcaaggggcattgataatccgggcagagattatttgaaacgaagaaagagagactagatacataactatattaccatcttgagtgactagaggataatccgaggcactgagattgatgaaccaatcccattctttactctgcttcaagagaatagcgcaagcgtggagcgtgttagccaccattgtgggtcctcgatacgtaacaaggttagcctttgtgatcatgtgaacatttccaacatcgctaaaaacaggatcttggctcacacgtttagccagctcaagcctctcttcagcaggagactcgagatcaagatgaacaacgtactgattcctaggatggtataatgttcgtaacactctccacagactctctaagtcacctcttgaccctgaaactagataaccaaagcgaggaagactaggctgtactggaggaggatgcgaggactgattgatctttgactctgcaaattcgactcgtgtctcgttggtggtcgatagattgtaggagaagatgagtgagttaatagaacggacagaagagaggagacccatgttgaaggatgcagctataaggaatatgaacatgagagaagccattgctagagggaatatccatctcttctctgagtttgaggacgccattaaagagccttctcatatgtgatcgatctcaaaaaccaatgttatgtcaacgaaagaagccaacactttgatattgtcgacgcatcagagaagaaagatcttcacaaatcgaggtagcgcctaacctacgccacagttgacacacaatcagaaatctatacatgtattgatgaatattgaattcaaacaacgatcaaacacagtttctgatccttgattccgatcatgcaaagagtaaaataaaaaattgatacaagtcgaaaaattgaagaggaagaaaaacagaggatttgatgaatcgtcgtgatcacaaagtatgagtatgagccgatcttgtaataataaaaaagatcgaaaagaaaaatctagagctgtctaaggataatgaaacctactttacatgttcctattcgtaagaaatcaaataacgtaaaaaaaatacctggttcttaaaatttcatggagatgacgtgagaatgtttaaagatccgggcagttcttaacacaatccacgaggttgtctttgtctgaaacgaagatttgtttaattaaagtgtcggattacgtacctttttttttttttctttcttttctatagaaactagataatgaaagaaagaaagaaatctgagagttatggtactagccactgggcttcggtttttccacagagatgttttcgttttaactcacttcccagaaagaaacggtgccttctcctttgactttttatctgagtcctttgatttttgatttgttgtgaggtactggcgtattaaattgcattaatttcaatatacaggctaaaaaaacataggagtacttcttattcattattggaggatgttactactgtatactggtgtggacaaaacgtgtgatatggaccgacgacgttgatgattgcatttcgaataaaatgaaaatggaggaaagtggcctagtaatgcggaaaatgccaaacatcgtatgatcgaggcataatgaaacccataataatgtttttaagaggtggcattatgatgatttagcttaatggttatgtgtcctcatttcaatctttgggttatacttaatttgtattattagttaatatatgtaaatatgttttccttaatggtattggatttattattaatggtatgaatatgtaaagaagtatttagtggaaaatatatttttctatatcccattcacctaaattccattaattgtcaaacatttagagctattagctatagtatttttatttgatatcaacaactctatttttatttgattactacacttttctttttaatgttaagatttataccaaatattttaaaatgattacaaaagtaaaatcttctagtaaattgaaactacgtaaataaaaatgtttattactttagttacttaaatatacaatttcccccttttttttaattattttttgctaaaccctaaaaatcttttaacggcgtttatcgttcttccactctctccgccgcgttctctgtctctcaaaccctcagggtaacgattcttcttattagaccaactgttgcttctttcgcatcgtagctctgagattgacccattgatttctcaactctttctcagtaatcagattcgattttgtttagtctcagctcagaacaatggcagctaaacctggagccgcaactccaacgtattcacctaaaatcgtcggaagaagtcggcttcctatattcaaagattccgacctcgattggtctcgtcctgatggccgtggcttccaccaatgccgacccgcatgtaaaaacacctttgattcctctaaattcttaatcgttagggttcttcattgtgaaattacggttggattcatatgactccagttatttgtgagactaaactagatttgaattttgtttcttttgtgaaaaatgcttctttcagtacttcaaactggtgctgtgagttctgcttctggttctgcttatgctgagtttgggaacactaaagttattgtttcagtgtgagtattattagattagaaaacttgtatattcaggatttgcattaacttttctgtcagctaaattcgcttttgtgtgttcaaaaattttagatttgggccaagggagagtaagaaagcaatggtttatagtgatgtaggtagattgaattgtaatgttagctatacaaattttgcttcccctactcttggccaggtaatctccaaatttcgcaacatttggtgttaacttgtttcatcaaatttagtaatacattgtggtattttagggaactgatcacaaagaatattcatcaatgcttcacaaagcattggaaggtgtaataatgatggagacgtttccaaaaacaaccgttgatgtttttgcattggttcttgaatctggaggaagtaagtcttaacaataactcgactgctatcaaaattattttaccagaatgtgattgcttattggttcgcttggacattcgtggagttgattatggaagcaacttattggattgttgtttggcattttctgattttctccaatggtattgtattgcaggtgacctctctgttttgatatcatgtgctagtcttgctttagctgatgccggaattatgatgtatgaccttatcacagctgtttcagtggtatgtgtatgttacaatagttgcattgattcctctgcgttatctcttatgtttattagcattaagtgaagaagaaagtaacacatacattgacatatacaagtgcaccatagtctgagacatgtaaaacgtatagatatctgttaattctttattttgatacactgaaattatgcctgcaattttcgaagtcttgcataggcaaaagccttatgatagacccggttacagaggaggaaggatgtgaagatggcagctttatgatgacgtgcatgccatctcgttatgaaatcactcagctaaccatcactggtgaatggacaacacctaatatcaacgaggtatgcctttcaataatatctcttgtccttaatttgccgatgacggttagagacaaaaggtctttcttttcttagtgttgaatattgatgttattcaactgctttgtttgtctaaatcacatggatattggttaattagactgttcttcattttctttttaagctgttcataccatagggtctatgttgttaacatataattgtgacataggagctgtgcagacatgttaccaaacatttgtatttcaaatattgcaggcaatgcagctttgcttggatgctagttcaaaacttggagagatcatgcgtgattgtctgaaacagtctgcctcagcttccgatgaatgagcataaataactatgattttggattgtagctcagacttggtatgaaaccggttttagctgttataggtaaacggatttagtctaaacctgtgtgtagtttaaaccgatgtatgttttcacataagatttgatggaactagatctttagctatgaaatggatcccaattgcgagtggtatcaaagacatacagaatttaaagtagggaatttcaacaaatcaatcacattgttctttacaatttcaaaaaacttgtggatgatattaatatcagattttctaaatttatacgaaaatggaatgatattaagaatagtatacagaaaaatgaagaaaagagtaactgatttttgcatcttaaaaaagaaaaagtcttctctggttcacacatcacacaagttgggggcggtgatgaaggagggtgtttaggtaatatcagctaacgtcggaacttcaactgatcatgtagtacgtacgatacgaagaagaagaatctaatccgcatgacatgtgattattttggtcagagagagaagagaagacgtgtgtcgcagcaaagtggacagttgtgcccttatagccaaagaagacttcacacgttttcaacaccacctaacaactgtttctttctatctcccacctcttccccatttttgtctttttatttcttcttctagtttctcccaattttctctttgatttttttttgttttttcttgtcttcttgttaagattgatacatgaactaatagagtaactagtaaattctaagacctttcagcattcttgaaatgacaattacaaacacacgataatttgcgggaacatgaatgatagaagacattagaaaaaaaaaactccaatgtataaaaagtttatgaaaaatataataacattttttacgaattattcagttttctgtaaatttttatttatttcgtaaatgcttgtatctaacatttcagctagattgttctactgattaatttctatctaacattttatgaactttatcatttcagtaaccgcaatgcccgtgaccactctgcatataaaagtgtatgtcttcttcacattcaatcacacgtactttcaaaattctactaaaaattaaatgttttttttttatataactaatcaaagatatctaaagtttttgagtcaaagttatgcgttactcaaatagaaaaaaacatttagaaacctaaaataatatctgctcctcctaaaacatttaataacattcaaaaacaagtcaataaaaaaaaaaaaatttacgaataaagcccttaattagtcaaaaatgaacgaacaaaacaaaggtaggagaaagtatgaatggcccaatcggggagattgcagtagattcatacaaatctgtaaatacaattttaccgggtttggtaaaaatcacaatagatcattttttattaataagaaagagaaaaagaatgcaaattcgtggggtttccaagaaatgcaagtgatatatttagagattgagatctgaccccattttttgcttaacacacaaaaaatccttgggcagaggaaaaagtttatagcgactcttttcctctaaaagggtctgtctcttccttcttctctcttcagatctccatttcacggtatccttctctcttccccttgtctctattgacttttatttgctttgatttttatcgatcgtctctgatcttttgctaatttaacttgtttccgtttgttttgaatttactctctcctgatctttggcatgtattttgaatctgctgttcttagttttttatttgatcttgttctcgtctgtcttaatattgaataattgactagttttatttacagatctttgcattatagatcccttcaagtgcgattttaatcgtagattagttttggatccgttatattggactgatgtttttgatgtattttttggtattaggatcaatcctgtgtttgaaacaatgggtgttgaagttgtaaactctggtggatttgaggttgctccggctcctttcgaggggaaacctgagaagaacgggaagctggaccaaggaaaaggagatgatgcccccatcaattttggttcagtcggtgagctaccaaagaatgccgaagagaataataacaaagtggtcaactctgatgcacccaaaaatgcagcagaagagtggcctgtggctaagcagatccactctttctaccttgttaaataccgttcttacgctgaccccaaaattaaagctaagcttgatctagctgataaagagcttgaaaagttgaacaaagctcggactggagttttggacaagttgagagctaagagggtatgttttttttgctaccttcttgtgtcggatttaggagtttcgttatttcttttatagtggtgctgataatgcggttttggtaatgcctaggccgagagatcagagttatttgatctgctggacccgttgaagtcagagcgtaagggattcaacacaatgtttgatgagaaaagaaaggaaatggaaccattgcagcaagcactgggaaagttaaggagcaatgatggtgggagtgctcgtggccctgctatctgttcctccgaggaagagctgaatagtatggtaattatatgagacctttttttttgttttcgatagctttggttagccttttcggtattctcatttgcctgagtttgtggaaaatgaagatatacagctatcagtatcggattcaacatgaaagcattccgttaaccgaggagaagcagattctcaaagagatcaggctgcttgaagggacaagagataaggtcattgctaatgccgctatgagagccaaaatcaaagaatctatgggtcagaaggatgatatccaaggtcaagttaaggtaagagagttgtggccggattcttgctgttatatagtctgtagaagttggtttcatatgtgatgctttttgcagttaatgggtgctggtttggatggagtgaaaaaggagaggcaagcaatttcagcaaggattaatgagctgagtgagaagttgaaagctaccaaagatgagattacggtactggaaaatgagctcaagactgtgagcgaaaagagagacaaagcctattcaaacattcatgacctcaggaggcaacgcgatgagacggtacaaacacttacttttgagcattttcttctgatgaagaaggattcgtttgtgtcaattagtaatctttgatttttgtattcttttctcatacagaattccgagtattaccaaaaccgtactgtgttgaacaaagctagagacttggctgcacaaaagaacataagcgagcttgaggcgctagccaatgctgaggttgagaaatttatatccctttggtgcagtaagaagaatttcagagaagattatgagaagagaatcttgcaatcacttgattctaggcagctgagccgagatggacggatgaggaaccccgatgagaagcctctgattgctccagaggcagcaccatcaaaggcaacgccttctgaaaccgaggttgtccctaaagctaaggcaaagccgcagccaaaggaggaaccagtttctgcacctaaaccagatgctactgttgctcagaatactgagaaagctaaagatgcagtaaaagtaaagaatgttgctgatgatgatgatgatgaagtatatggtcttggaaagccgcagaaggaagaaaagccggttgatgcagctacggcgaaggaaatgagaaagcaagaggagattgctaaagccaagcaagccatggaaaggaagaagaagctggcagagaaagctgctgctaaagctgctataagagctcaaaaggaagctgagaagaaagaaaagaaggaaattaccttttcttttttgttgtacctcaatgctctttgcattcttctctctccattctaacagttctcgccatctttttttgtgtgttgcaggagcaagagaagaaggccaagaagaaaaccggaggcaacacagaaaccgagactgaggaagttccagaagcttctgaggaggagattgaagctccggtgcaggaggagaaaccgcagaaggaaaaagtcttcaaggagaaaccaataaggaacaggacccgcggtaggggaccagaaacgatcccaagagcgatccttaagcgtaagaagtcgactaattactgggtttatgctgctccagcggctctggtggtactgttgcttcttgtcttgggttactactacgttctctagatcgaacggagtgatcaagcgaagctgtcttgttgtagtttggaatactttaaaactgggatttttgccttcttgactcttaaaaaactcataagcttatgcatcttttacatacgagtagagactcttttcttttaagtactttttacaatcttctcttctgttgttgaggctttaactttgaaggaagaaaacagtttttgttacattttatagttttccataatgtactgcttgagatttgatatttcttttcgtctctttgcaaggtcgttgggtcaaaaaatttccatgataatagaaaccattttatacataattatcagagactaaagtagtgacatttctacatgatgaactcttttacaacagaagattaacattcagcttttagaccctcttcctctgttctctctccaagctttttgcttcttattccacctttctttagcaatcttgtctgacttccaccgttggttccgaaatcgttctctcccttttagccagtcggagtagtccttaccgggatcacacgctatgaaatctgccaactcgtccacatcggtttttgtcacgttaccttttcctgccatacaccacagaaatctctccccattgcaggtttcctcttcaacaccaactcctgaatctgaaccattctctggacctttagcttcagacaccttcctgcacaaccatggagtaatatgtagttgttggttaaagctctcatggatgcattatgaaagcgaagaagagaaaaaatatgacttttgctggtctatacataccccaagtacaaagttcggtttttgtgaaacttcaaagcaactgccccgctctgtttcctatctactgctgtctgtaccatataattatattgatccatttagaaaagcgcagaatttagactttgtgcaaaagagtttttagttgttaccttgtcagctttaccagaagcagccaagtttttggaaccactggatagtatagacgatgacgtgttttctgagtgaccaactgaatccccaagtgcttccaagtcacccccttctaggatgaataaatacatagatatcaccattccaaaaatggagtccttcactagaaagtcaagcttgagtgcaaagcttacagacagtaagcctgaaaaatgcataagcatccacttagatctgtgagggtaagattccattctatcgcgcaggaaactttgacagggcatatgaatattgaactgttcaaaacgttgaacaacatccatcatggctttgtattccttgcaagctcgaacatcacctccagcttcatgccagttccaattcctgagaacccggatggcttgcaacatcgaacaagtcatgaacttaagtgtggatgcaagcagatatagatcttccatactagatgtgttgtatttttccaacacagagtccataacatcatcagaactagctctaagtatcacgcaaccaagaattgataaggtctgagacaacatactttcagagcaggagctatcaaatacacataagctttcctttgcgtatgcaacagaatacgctaccagctcattgttttctctcttcgcattatcactttgatatgaatcccatgaatcctttagctgctgtgtaacatcattaactttcgccagtgttgagggcaaaagacgatgttcaaaagccacccgagacttactcgtcaaaaagccaaacttcccagacaggccattctcactcttagacatgtgtctcttatacaaaacaacagacttttcaaatgcatcaatatagtgatcaataagctgaaggtctaatcccttaaaacatggatgtgaacaaataccaatggcgtcagacaccaataaaaccacataggcatggatcatttttggtgcagagaacataaccgggtttagcagcaaggacacagcagcactcaagcttatctggggagttctaaatgcattacctttcttccaatataatctctcaacacacatttgattcgttttctcatcagaagttgcgataataaaatgagcagaaacgatttgcaccacaccggccctatcatgcttactaaacagtctacatgaggagaatgcagaatcaactacgaaaagaaggtcgctgattgacttattcaccaaaatctcatccataaaaacctgtacatataaataatcaaaaacccagtgagcatgctttcttcaacttaaaagcccttgccaaaggtatagtcaaaaagccacaagttcatcagaaatccaagataaaaatgagccacaaattagttaacttttacctcaatccctgtacaaagaaacgtatgacggggatctaaagaaccgtcatgcgtgaatacaaaagaacaatctccatttcttgcacgaatcaatctaccgaggatcgagagaagagttttggccttctccagaacaagctcttgtttggccacaagtaaagacatgatcttcatacaacattttaagaacagcgaagctaattcaatactatcttctgtactttcaaatgtaggacaagtttcagccttttgtttgaataaagtagcgaacaggctttcgagactcctatcaagctctgtgaacaacacatcagagaggaaacagacatcatcgaaattgatcaagtccactttctctccacggaacttgatattccaatgatgtgaagcaatgtcacaattctcccaatttgttggttgggttaatgataaaggacccagaaggcacaataaacgtttcaaaattggcttctgagaaacctggaaattcaaaaggactgttgattatttccaaaaacccacaaatcctaaattacttcacacccttaaaaatcataacttttgagcacgatactaatcctcgacaaaatttaggaaactaatcagaatctaagcattgcccagtacggctaattgaacagaaaccaagatgcagaaacattgtactcgaaattgagaaaattgtacctgagaggacgtaattgctgaagcaagggatcggaataagttgacgggatctgagaccttcgaagctgggcgtttcttactcttccgcttggccgtcatcgccgtaaggaaagaggagaaaatgcttgtttcggtgaggttctcgatttgagtgacttttggtgtgtggcgggaaagcacaaagcacgcgtcgtttttgtgtattcaaaacgacacgcagttattaagaaagaaggctatgtttgtttgtttggtcacaaagactaagtcgctcctgaccaggttacagttaagttgactcttgagttcccgactttggattgaacaggagtgatagtgaactcaatcttgttttgggctcttcaaattgggcttgagcatcaaaattttgacaagcttacaaatatggactggacaatcgcgtaatatgacttttgatctttgtgcgtcatgatttcttatttttttgttttgcctggttgaaaatattttgagaggaacttggtgcttggtgggtcttgatagagacactatgtattgtcagttgtcactgtttctgtgtccaatttcaacacttggacgattcgtagcatacgccacgtttcaccgtcgaggggcctatactagctagcgatgattcaatggctacttgtcacgtgtacctctccatagccttgcaacatagctatcgtctttaatatctttggtctcattcaaaataacactactttggttctgttcttaacatgttttttttcttcctaatacaatctttcagcctcagttaatttatttatacgaaccaaacaaaattaacatcccgaaaatggggaggattaccacgaacacaattgtgaaaaaaaacaaaaaaaaacacgaacacaaatgattttagcttctttcttgcgttcagttgaacacttttcttcatagtgatcgattggtaaattcaagtcaatacgtttcaaaacgctccatatattggatgcagtgaatgcaaaactattgtaggtccataggtttctactgccgacagagagaagaaataagcaaaaattcaatttggtaaagtgaaattaaaccgtggactgtggacaagaaaaaaaggaagaaaattctgcaagacatgtcgtaaccacgtatcttgttagatcataaaatacaaataaagtggaaaaaaaagaactttcttgcatgagtgacattgacataaagaaaagcatcaaaaaaatacgtggagcttttagtaggtaaatgaattaattgaaaagtaactttcttgcattagccaaatgtgattgtaaaagcattgaactatatatgtaaatgcaagcttcgtacgacccaactttgtatcaatccattatccatgcaactctaaattattgaacgaactaaacagcattaaactttactactactttgttggttaggtcctagtattacaaactctctacttcaaaatattcttggagaacagattaaacgacctcattgcgtttgagtttgagatgcgacattgagtttcaacactaaccttatgcattcacatgtaaatgtaattaatatataagtatgatgtatcacataatgttggtataagtggagttatcatgtttagaactgtctattatttataacaaaacaatccaactatactgaataatacagaatcaaactgggatccaaaaacaatttaaaacaaagttggaaactcaaccgaaacaagaacaaatcgaatccgacatgaaacaagtctcacaagtgttcttaagctgacagaaagatggtcaaaaccaaacttaaaaccgtagtaatcgacataacggtcataccattcgccgacgattttttctgccctggagctccagccggcgtagagatatcaccagcggctgatggaccatctcctgaaggacccatcgccgagcctgacggagaatctgacggtgaagaagaagtagagcctcccggagccaacgatggagaaacggtgggtgagtttgaaacaggggatgaagatttaggtgccattgatccaggtggtgaagtcatcggagcagaagacggaggaatagttgaagatgatttaggtgccattggtgccggcggtgaagtcatcggagcagaggatggggaaacaggggacgtggatttaggtggtgccggtggtgaagtcgtcggagaaacaggggagccggatttaggcgccattgatcctggaggagaagtcgccggagagacagctgatgaagatttaggcgagtgagctcctccaggcggagtagtcgatcccggaggagaagtcgtcggagaaacaggggaggaagatttaggcgagtgggctcctcccggcggagtcattgatcccggcgtagagcttcccggtgcagcggcgtgaggagactgagccgttgatggaatcctagcagatatgacaacgacattaagcttttgacccttcttacagttatcttcattgccactgatgaagtaaaacggaccataacgatcaagagagatctcagaatctccatcgtccactcttttgatcggattctttgtattacaagcgtcgtaatcagccttgttcacctctagcaccgagtcagctcccttagcgtagctaaaatctgcaagaatcgaaattgagtttcagacaaaacaaaagtacactctaagttaacgaaatgacacaaacgggtaagagagtgagagagagagatgatatatacagagagtgtcgtgaacaaggaaacggtttttgccagaccaagattcgtagttttcaggtgggtttgtaacccacgcgccactgcctccgacattaaacttccgtgcgttggagatggtgaagagggtcgagagagagaggaggatggtgaagaagaaagaaaggcttttcatttttagaaaggtcatgtttttcaaaagctgcgagagattttcaacaagataagagatgtttatatagaaatgaagcgtttataatgggctaaggaaagtgtgaagcttttttgtcttaatgatagagagaggtcgtttttatgggtaatacgtgttcgaaattgaatctctgtatctactcgttttcctcacattaaaagaagatattgcttcttcgtatctgccgacgtgtttaatttaattctttttgggatttgaagttatatgaatttatccccgggaaaaacgcattagagaacagttggttttgtggaaagaatcggattcaacgaatcatatgcttccattatatatgagaataccgaaaagtctgaaatcttgcatcaggtcttaattgcaaattcattttccatttgatatgagaataccaaaaagcttcaaccatatcgacattagtacatattggtctgatggtctctcctacgtattttcgacgaaagaaacttgcgaactcggaagagcggtacaggtggtagtccgtagtctatagtagatacaacacttgcaacattttgaacatatgggctgggcttataaggttcgggccctttattttctttcttagagttgatgatgataagaagactagagtcacttttttttagcacaagaatctctgaatcagcctttgcttctgttgctctggggacacgtgagaagcacagtgattagccacgtgttcttctcccgacactaactcgatcctcaaagtacttccatcggtgtgtatatagatgagagcgagagctagataatgaattgaaaagtgtagaaaatggcggctatgtttttagcaaagagaggagccataaacatacatagagcttcttcattacacatagattacaacaacagttctcgatctgttgttgatggagtcattactatcactaactctcgttacttcgcatcccacgtacgtttttgaaatttgttgaagatagattaattatgcatacaaaaatcgttgagctgttttcacttaatattttcacatattctgcaggggaacaacggagagaagtcagaggaagaggcgatggggacaactacagatggtaaagctccgaatgtgacattgggtcatgcggcggatacagccaaagaaggattgaaacgagccaccgatgcagccatcaagaagagtggagatgtgggcaagccgaagagtgtagagaatgatgaaggagatgatcaggaggatgtagcagtgggtgatgatggaactgtcaaaggccaaaatcagtcagcaggatgagaatatatatagagacttcgttaaaagattatcagctcctaatgaaatggatgctggtttaaaccgtgtagtatgtttttttatttatgtagaaaaccatctgttaccatttataaactcatccttttatttcttacaatgtgtggtttcttttttgttttgtttttagatgatgttgtctaacattcacactttcttaatctaccatctaactgctattgttgtctgcctctctctgagtttgagttaccaaacactacatttcttgatttccaaaactgctgatgaatctctcattcaaaatccaaaactcgtgtggatgcggtttatcttcctcgagttggtttcttggatggcgtgagctttctgaacccagcatgcaatatcataactacaacatagacacagaagtattagaggtcatgaaaggccatacaaagttatatcagacttgacaattgcttagtaagttacctgaataactgatcgcaagagcagagaaaagagccatttggacattcaaaaacgttagaagaaccgctgttgctgcaagtagaagaagcaaggaaacgatttaaggtccatcctactatataatccattgacaaatgtcagtttcttgctaataccatgtataatcaatcccataagaactttcaaaacattgtagcccggaacaaattgatccaaaacattacagaaactcaaaagtctctcttattgaatgcatatcaaaacgttttgcagcattctgtgactataaacaagttgcagaactacaaataccaccacggtcccatcttcaattagcaaaagacaggaacaaaatgatcgaaaaactcaccgcattgtccaataccaatcgagagtttcctcatggaagggtgacgatcaaatttccacttatcactgcagtatttgaatagctcccaaagagctaagcttcctaacaatcccaccaatgcaagtggcatctgatatctacaaacaccaaaaatcaacacttcaattccaacacaatttcaagattcacactttagtctaaagctttagcctttatctaattaaagagtaatgggtcctcacagtgcacaagcaaagaagacgatgaacaacgtagcgtaattcctagcgaatcgtttgatattctcatgaactctcattctcgcttgctgagaagacgacgggaacgaataagagtcacaattgccaatgaaaccggtggtccacggtgtcgtatctccggaaaaatcatcggcggagagcttagagaaagggttaatagtaagaagagaagagacagtgacgagtcgagataagagagaagcgaagaaaccaccggtaatggatgaaacgacatcgtcagatgccgcagaagttgcggcagctgaggatgaaacggaggcggaggaggaagcggcagctgcagcggcggaggtgcggtgatcgaggagctcgaggtaaccggaatctcgaagccaagattcgaaagcaggatcggggacgcttagagagagaggattaggagagaaagccattgttgttgtcgccgtgattatcccatagtaggtctctcgtctcctcggtcttcccaaaatcaatttacaagaaattgcaactcgtgatccaaaatatcttcataattgctaatatagggctcttatattatcttttgttaatttaactcctataatgtagtttaatggttcttgttaatcaattggcttactaaataccttttatattagatgaaacatgcatgcacgaaactaaatatcatattaattattaaaaaaatcattctatgaattaagatagctagtagtttaaaaaataaaataataacagaaattatttattaaatcccattttttaaaaataaaagattctggtatgtacatgttttttaaaatggaactaaatatattgatacagtatctattaattttaatttttgaatatcaaatgatgataaatagttatcctaagaagaactatacaatgtataaaaccaggttattggatacaggtattaattaactagtgattttaaaatatgagtgtggacaaatatatgaaagacacatgtctaaaaatgtgagaaccacttgattataaaatcgtctactaatatatagtataagataataaagtttcttattttgtgtaaacaaacgttcacaaagaaataaattcaaaaggtaatattgaattgaaaactctgtctttagccaagtgttttaacgagtttgagattttatcctcactttatctaatatattaatgggatctgatacacgacagaaataaagaaagaaaaaaacagaagcatgtacgtatatattttcaggactattctaggaaaaaaatcagcaaaagtgaaaataatctaaagctaactagagaaagtttttcacctcaccaaaaggaaagactagctaaattcttaattattatcccgcaccctgccaaaagtcgagcgttaagtttcttataaattagaagaaagacgagaccattcttctcatagcttttttagaaggaatactgatagagagaaagaaaaatggcaaggccacgactgcttgtagtgtcgatgtcgcttccggtcactgcaaagaggactggagaagagtcttggtctttcacgatgagtcctggtggtctagttagtgctcttctaggtaagagaatgtaccaactttggtaatatcgtaattaataattaattattgctttaaacacaaagaaacctgttttaattttcgtcatgatctcttaaaggtttgaaagaatttgagaccaaatggattggatggcctggagtagatgttcatgatgcgattggcaaaaagacactctccattaccctagctgaaaaggtacgtacacattcgtaaatcttctatcgtatacagtcatgtttaattttgttttgtaactcgaaattagagtctgaaaacatgaactttaatacggattgtgtaaccgttatgtaagtattgcatggttaaagagagtaaaggagacaatgatcattaattgatcttgactaataaaacacgaccacctagattatgtcattaattatcatattaaaacattttttttggttaaaatgctaaagattgtggtaactttttttttgttaataatatgatgatttcattcttggttttggttttgtagggatgtatcccagtgtttttggaagaagtgtgtgatcaatactataatggctactgcaacaatattctgtggccgatttttcactacttgggaacgccaccagaatatcgtaacgatgcaaccataacataccagtcacagtatgaagcatacaagaaagcaaatcaaattttctttgatgttgtcaaagagcactatgaagaaggagatgtggtttggtgccatgattatcatgttatgcttcttcctcaatatcttaaggaatacaacagtaagatgaaagttggatggtttctccatacaccatttccttcttccgagatgtacaaaacattgccctcgcgatccgatctgcttcgttctgttcttactgctgatttagttgggtatgtaaatatcttttactttttaacagtgtagtaatcaacccatgatctcatatatactcccttttctctgttttttttttttgttgttgtttgtatagtttccatacctatgacttcgcaagacattttttgaatgcatgcatgtgtattcttggagtcgaagcaacatctgaaggaattgtggatcagggcaaagtcactcgagtagctgttgtaatgacctatcttaaaatctctttatattgattatatgctatgatttgtttaatttaatgaaacattttgtcttatttggatgttagtttcccattgggatagaacctgagaggtttataaacacaagtgaactctctgaagttgttcaatacatgaagaagttcaaaaacgattttggtgggagaaaggtatatatatttacttatatatttgaagcttagaagaagaaactgtttaattaacataatgatttttgttgacagttgatattaggtgttgatcgtctcgatacgatcaaagggattccacaaaaatatcaggcatttgagaagttcttagaggaaaatgcagagtggcgtggtaaagtcatgttacttcagattgcagtgccaacaaggaacggtattggtgaatgtaagttttttctatctcttcttcctcttttataagctaatatgtgcatcatattcataggattgtgtttgtgtcctattacagatcaaaagatcaaagaccaatgtcattaccatgttggacgaattaatggtcgttttggttccatctcttctgttccaataattcacctggtttgttattttctcggttttatgatgttgtcacgagttatactatttgtgatggtcttatagtagtttctgataaagatttcatccttctatgtcaggattgttctattgactttaatcaattatgcgcactttatgccatcacaggtaatattcatactacattgatgatttggttataatattatgtataaaaatgaaacatcttccatatataatattagtttggctcttatgaaactgttgtcaaggttgattggtaacaaatgagtttatgttgttcagatgtattacttgtaacatctctgagagatggaatgaaccttgtgagttctgaattcattgcctgccaaaaagcagaaaaaggggttctcattctaagcgaggtaaattaaattttacatagttctgatgttaatattttatgaatcaaataatgctcaaaagtaatttctatttgtatggggttcacagtttgcaggtgctggacagtcacttggtgccggagctattttagtgaatccttggaacattaaagaagtttcttctgccattggagaagctctaaatatgtcacatgaagaaaaggagagaaaacataaaatcaattttcagtatgtgaaaactcactccactcagcagtgggcagatgatttcatgaagtatgtgcaaaccaaaacattgattttcttaatctcaactttgtgttcttttttttttagattgactcttacaaacattttatgcagtaaacttattgagattacaaccagcgcggagctaggagctggattagccgccacacttgaacttccagaacatgatgtgattcaacaatactcaaagtctaacaatagactgctgattcttgtaagtggtacatatatcaagattctcttgtaccttttcttgttgtcacttagttatctttttaacttctaaaacaacgtccagggattctatggaacgctcactcagccgatgaaaaatcaagagagaagaggcgacggaatgaatcttgaactgcatccacagctaaaagagagactcaaagaattatgcagtgatccaaaaacaacagtagttgtcctgagtagaagtgaaaaatgcatattggataaagtaaatgttgcctctctcttcttttaaatttagttacttattttctcattgtgttctgacattgtaactaaaactaaaccagaactttggagaatataacatgtggttggctgctgaaaatgggatgtttctaaggcatacaagtggagaatgggtgacaagaattc

SEQ ID NO: 637 - DNA, 95679 bp, Arabidopsis thaliana
aagcttcgtacgacccaactttgtatcaatccattatccatgcaactctaaattattgaacgaactaaacagcattaaactttactactactttgttggttaggtcctagtattacaaactctctacttcaaaatattcttggagaacagattaaacgacctcattgcgtttgagtttgagatgcgacattgagtttcaacactaaccttatgcattcacatgtaaatgtaattaatatataagtatgatgtatcacataatgttggtataagtggagttatcatgtttagaactgtctattatttataacaaaacaatccaactatactgaataatacagaatcaaactgggatccaaaaacaatttaaaacaaagttggaaactcaaccgaaacaagaacaaatcgaatccgacatgaaacaagtctcacaagtgttcttaagctgacagaaagatggtcaaaaccaaacttaaaaccgtagtaatcgacataacggtcataccattcgccgacgattttttctgccctggagctccagccggcgtagagatatcaccagcggctgatggaccatctcctgaaggacccatcgccgagcctgacggagaatctgacggtgaagaagaagtagagcctcccggagccaacgatggagaaacggtgggtgagtttgaaacaggggatgaagatttaggtgccattgatccaggtggtgaagtcatcggagcagaagacggaggaatagttgaagatgatttaggtgccattggtgccggcggtgaagtcatcggagcagaggatggggaaacaggggacgtggatttaggtggtgccggtggtgaagtcgtcggagaaacaggggagccggatttaggcgccattgatcctggaggagaagtcgccggagagacagctgatgaagatttaggcgagtgagctcctccaggcggagtagtcgatcccggaggagaagtcgtcggagaaacaggggaggaagatttaggcgagtgggctcctcccggcggagtcattgatcccggcgtagagcttcccggtgcagcggcgtgaggagactgagccgttgatggaatcctagcagatatgacaacgacattaagcttttgacccttcttacagttatcttcattgccactgatgaagtaaaacggaccataacgatcaagagagatctcagaatctccatcgtccactcttttgatcggattctttgtattacaagcgtcgtaatcagccttgttcacctctagcaccgagtcagctcccttagcgtagctaaaatctgcaagaatcgaaattgagtttcagacaaaacaaaagtacactctaagttaacgaaatgacacaaacgggtaagagagtgagagagagagatgatatatacagagagtgtcgtgaacaaggaaacggtttttgccagaccaagattcgtagttttcaggtgggtttgtaacccacgcgccactgcctccgacattaaacttccgtgcgttggagatggtgaagagggtcgagagagagaggaggatggtgaagaagaaagaaaggcttttcatttttagaaaggtcatgtttttcaaaagctgcgagagattttcaacaagataagagatgtttatatagaaatgaagcgtttataatgggctaaggaaagtgtgaagcttttttgtcttaatgatagagagaggtcgtttttatgggtaatacgtgttcgaaattgaatctctgtatctactcgttttcctcacattaaaagaagatattgcttcttcgtatctgccgacgtgtttaatttaattctttttgggatttgaagttatatgaatttatccccgggaaaaacgcattagagaacagttggttttgtggaaagaatcggattcaacgaatcatatgcttccattatatatgagaataccgaaaagtctgaaatcttgcatcaggtcttaattgcaaattcattttccatttgatatgagaataccaaaaagcttcaaccatatcgacattagtacatattggtctgatggtctctcctacgtattttcgacgaaagaaacttgcgaactcggaagagcggtacaggtggtagtccgtagtctatagtagatacaacacttgcaacattttgaacatatgggctgggcttataaggttcgggccctttattttctttcttagagttgatgatgataagaagactagagtcacttttttttagcacaagaatctctgaatcagcctttgcttctgttgctctggggacacgtgagaagcacagtgattagccacgtgttcttctcccgacactaactcgatcctcaaagtacttccatcggtgtgtatatagatgagagcgagagctagataatgaattgaaaagtgtagaaaatggcggctatgtttttagcaaagagaggagccataaacatacatagagcttcttcattacacatagattacaacaacagttctcgatctgttgttgatggagtcattactatcactaactctcgttacttcgcatcccacgtacgtttttgaaatttgttgaagatagattaattatgcatacaaaaatcgttgagctgttttcacttaatattttcacatattctgcaggggaacaacggagagaagtcagaggaagaggcgatggggacaactacagatggtaaagctccgaatgtgacattgggtcatgcggcggatacagccaaagaaggattgaaacgagccaccgatgcagccatcaagaagagtggagatgtgggcaagccgaagagtgtagagaatgatgaaggagatgatcaggaggatgtagcagtgggtgatgatggaactgtcaaaggccaaaatcagtcagcaggatgagaatatatatagagacttcgttaaaagattatcagctcctaatgaaatggatgctggtttaaaccgtgtagtatgtttttttatttatgtagaaaaccatctgttaccatttataaactcatccttttatttcttacaatgtgtggtttcttttttgttttgtttttagatgatgttgtctaacattcacactttcttaatctaccatctaactgctattgttgtctgcctctctctgagtttgagttaccaaacactacatttcttgatttccaaaactgctgatgaatctctcattcaaaatccaaaactcgtgtggatgcggtttatcttcctcgagttggtttcttggatggcgtgagctttctgaacccagcatgcaatatcataactacaacatagacacagaagtattagaggtcatgaaaggccatacaaagttatatcagacttgacaattgcttagtaagttacctgaataactgatcgcaagagcagagaaaagagccatttggacattcaaaaacgttagaagaaccgctgttgctgcaagtagaagaagcaaggaaacgatttaaggtccatcctactatataatccattgacaaatgtcagtttcttgctaataccatgtataatcaatcccataagaactttcaaaacattgtagcccggaacaaattgatccaaaacattacagaaactcaaaagtctctcttattgaatgcatatcaaaacgttttgcagcattctgtgactataaacaagttgcagaactacaaataccaccacggtcccatcttcaattagcaaaagacaggaacaaaatgatcgaaaaactcaccgcattgtccaataccaatcgagagtttcctcatggaagggtgacgatcaaatttccacttatcactgcagtatttgaatagctcccaaagagctaagcttcctaacaatcccaccaatgcaagtggcatctgatatctacaaacaccaaaaatcaacacttcaattccaacacaatttcaagattcacactttagtctaaagctttagcctttatctaattaaagagtaatgggtcctcacagtgcacaagcaaagaagacgatgaacaacgtagcgtaattcctagcgaatcgtttgatattctcatgaactctcattctcgcttgctgagaagacgacgggaacgaataagagtcacaattgccaatgaaaccggtggtccacggtgtcgtatctccggaaaaatcatcggcggagagcttagagaaagggttaatagtaagaagagaagagacagtgacgagtcgagataagagagaagcgaagaaaccaccggtaatggatgaaacgacatcgtcagatgccgcagaagttgcggcagctgaggatgaaacggaggcggaggaggaagcggcagctgcagcggcggaggtgcggtgatcgaggagctcgaggtaaccggaatctcgaagccaagattcgaaagcaggatcggggacgcttagagagagaggattaggagagaaagccattgttgttgtcgccgtgattatcccatagtaggtctctcgtctcctcggtcttcccaaaatcaatttacaagaaattgcaactcgtgatccaaaatatcttcataattgctaatatagggctcttatattatcttttgttaatttaactcctataatgtagtttaatggttcttgttaatcaattggcttactaaataccttttatattagatgaaacatgcatgcacgaaactaaatatcatattaattattaaaaaaatcattctatgaattaagatagctagtagtttaaaaaataaaataataacagaaattatttattaaatcccattttttaaaaataaaagattctggtatgtacatgttttttaaaatggaactaaatatattgatacagtatctattaattttaatttttgaatatcaaatgatgataaatagttatcctaagaagaactatacaatgtataaaaccaggttattggatacaggtattaattaactagtgattttaaaatatgagtgtggacaaatatatgaaagacacatgtctaaaaatgtgagaaccacttgattataaaatcgtctactaatatatagtataagataataaagtttcttattttgtgtaaacaaacgttcacaaagaaataaattcaaaaggtaatattgaattgaaaactctgtctttagccaagtgttttaacgagtttgagattttatcctcactttatctaatatattaatgggatctgatacacgacagaaataaagaaagaaaaaaacagaagcatgtacgtatatattttcaggactattctaggaaaaaaatcagcaaaagtgaaaataatctaaagctaactagagaaagtttttcacctcaccaaaaggaaagactagctaaattcttaattattatcccgcaccctgccaaaagtcgagcgttaagtttcttataaattagaagaaagacgagaccattcttctcatagcttttttagaaggaatactgatagagagaaagaaaaatggcaaggccacgactgcttgtagtgtcgatgtcgcttccggtcactgcaaagaggactggagaagagtcttggtctttcacgatgagtcctggtggtctagttagtgctcttctaggtaagagaatgtaccaactttggtaatatcgtaattaataattaattattgctttaaacacaaagaaacctgttttaattttcgtcatgatctcttaaaggtttgaaagaatttgagaccaaatggattggatggcctggagtagatgttcatgatgcgattggcaaaaagacactctccattaccctagctgaaaaggtacgtacacattcgtaaatcttctatcgtatacagtcatgtttaattttgttttgtaactcgaaattagagtctgaaaacatgaactttaatacggattgtgtaaccgttatgtaagtattgcatggttaaagagagtaaaggagacaatgatcattaattgatcttgactaataaaacacgaccacctagattatgtcattaattatcatattaaaacattttttttggttaaaatgctaaagattgtggtaactttttttttgttaataatatgatgatttcattcttggttttggttttgtagggatgtatcccagtgtttttggaagaagtgtgtgatcaatactataatggctactgcaacaatattctgtggccgatttttcactacttgggaacgccaccagaatatcgtaacgatgcaaccataacataccagtcacagtatgaagcatacaagaaagcaaatcaaattttctttgatgttgtcaaagagcactatgaagaaggagatgtggtttggtgccatgattatcatgttatgcttcttcctcaatatcttaaggaatacaacagtaagatgaaagttggatggtttctccatacaccatttccttcttccgagatgtacaaaacattgccctcgcgatccgatctgcttcgttctgttcttactgctgatttagttgggtatgtaaatatcttttactttttaacagtgtagtaatcaacccatgatctcatatatactcccttttctctgttttttttttttgttgttgtttgtatagtttccatacctatgacttcgcaagacattttttgaatgcatgcatgtgtattcttggagtcgaagcaacatctgaaggaattgtggatcagggcaaagtcactcgagtagctgttgtaatgacctatcttaaaatctctttatattgattatatgctatgatttgtttaatttaatgaaacattttgtcttatttggatgttagtttcccattgggatagaacctgagaggtttataaacacaagtgaactctctgaagttgttcaatacatgaagaagttcaaaaacgattttggtgggagaaaggtatatatatttacttatatatttgaagcttagaagaagaaactgtttaattaacataatgatttttgttgacagttgatattaggtgttgatcgtctcgatacgatcaaagggattccacaaaaatatcaggcatttgagaagttcttagaggaaaatgcagagtggcgtggtaaagtcatgttacttcagattgcagtgccaacaaggaacggtattggtgaatgtaagttttttctatctcttcttcctcttttataagctaatatgtgcatcatattcataggattgtgtttgtgtcctattacagatcaaaagatcaaagaccaatgtcattaccatgttggacgaattaatggtcgttttggttccatctcttctgttccaataattcacctggtttgttattttctcggttttatgatgttgtcacgagttatactatttgtgatggtcttatagtagtttctgataaagatttcatccttctatgtcaggattgttctattgactttaatcaattatgcgcactttatgccatcacaggtaatattcatactacattgatgatttggttataatattatgtataaaaatgaaacatcttccatatataatattagtttggctcttatgaaactgttgtcaaggttgattggtaacaaatgagtttatgttgttcagatgtattacttgtaacatctctgagagatggaatgaaccttgtgagttctgaattcattgcctgccaaaaagcagaaaaaggggttctcattctaagcgaggtaaattaaattttacatagttctgatgttaatattttatgaatcaaataatgctcaaaagtaatttctatttgtatggggttcacagtttgcaggtgctggacagtcacttggtgccggagctattttagtgaatccttggaacattaaagaagtttcttctgccattggagaagctctaaatatgtcacatgaagaaaaggagagaaaacataaaatcaattttcagtatgtgaaaactcactccactcagcagtgggcagatgatttcatgaagtatgtgcaaaccaaaacattgattttcttaatctcaactttgtgttcttttttttttagattgactcttacaaacattttatgcagtaaacttattgagattacaaccagcgcggagctaggagctggattagccgccacacttgaacttccagaacatgatgtgattcaacaatactcaaagtctaacaatagactgctgattcttgtaagtggtacatatatcaagattctcttgtaccttttcttgttgtcacttagttatctttttaacttctaaaacaacgtccagggattctatggaacgctcactcagccgatgaaaaatcaagagagaagaggcgacggaatgaatcttgaactgcatccacagctaaaagagagactcaaagaattatgcagtgatccaaaaacaacagtagttgtcctgagtagaagtgaaaaatgcatattggataaagtaaatgttgcctctctcttcttttaaatttagttacttattttctcattgtgttctgacattgtaactaaaactaaaccagaactttggagaatataacatgtggttggctgctgaaaatgggatgtttctaaggcatacaagtggagaatgggtgacaagaattccagaacacatgaatttggaatggattgatggtgttaaggttagtacatatttctcataactcaagattgagaattgtatactttaacctcctcaatctcttgttgttgctttgtttgcagcatgttttcaagtacttcactgaaagaactccaggatcatatctcgaaacaagcgaggcttcgcttgtatggaactacgaaaatgcaggtgatcatatggactgaatatatgcaaattatccgcttgcattttttttttgattttccaacacttatctttgtttccttgatctgttgttttgtttgtagatgctgaattcgggagagctcaagcaagagacatgttacaacacttgtgggcaggaccaatctctaatgcctcagtggatgttgttagaggaggccaatctgttgaagtccatgccgttggtgtgacaaaggtaaataaatactctgtttctatatcatccattcccaaaagattctcatttttctcatgtatgttctttctctgttaccttagggaagtgcaatggagcgtattctcggagaaatagtgcataacaagtcaatggctacaccaattgactatgtcttgtgcattggttgtttcttggggaaagtaagcttcttatgtaaccaaatattgattgataaacaaaaaagtaaaactatccatagattttgatacaatggttgacatatatgtttcaggacgaagacgtttacacattcttcgagccagagttgaccaagaaagccaagtcgctttcttcttcaggtagtgactcccccaagaaggtatcatcgaccattgttgacctcaagggagagaattacttctccgtagctattggacaaacgcacacaaaggctcgctatttccttgactcatctgatgacgttgtgaaacttattggcaagctttgcacacacaacaatgcttgattctctctgtaactagagatgttagctaaatgatactattgaatattttaattgtgcaaaactcatttgcatcgttctgtttgtttctgttttcagtttgtttctttgtctctttcttccctttgttctttaatggattagaaactattttcttaagagattttattgtcttgcccttacaactacgaaacacattattataaagccaactagggaaaacagaggtacttcaagtaaggtttggtttataaaaccttataaatcccctactgctacttagaaacatgatacaaacaaacaaaaacacacttggaaacagaagcacttcaagatatatagtttggtttgtaccaaccttattgatcactcccttctacttcgaaacatggttggtcccagagacaagatcctgcaatgactctatgaaattatcgacataaccggtcacaagtccaggactagttagtgtctccctccacttggtgtgattcttcttcaccagattcccgatctcactgtcccttttcatcacactattgatagcatcgaacaagctctctttcgagaaccatcctgtttcctctcttgccacttcaaccgaaaccttgagttcgtcactcagcaatcttgtgttgaggacctgatcacccaactgtggtaccaagactatctgacaatcactcagcaaagactcccacattgatccaaacccacaatggctcacaaagcacccgactgatggatgagacaatagcaatggttgttgaacccattctccccaaacaactcctcttcctttaaccctctcctcgaatccttcaggaagtgcttcttgaatcgttgatgagcctctaggtggcttaaccgctacaagaaacggtgaacctgttagctccattcctaagcagagttcttggaattgatctttctctaaaatgacttgtgagcccaacgcacaaaacaccactgagtctggttcatacccacttagccacttaacccatcgttcctctagctctctagtcttgtctggctcagggaacaccggacctgtcaagagaacctttttcctgcaatgtttttcgatatagtcgcaaaagtttccttcgatttctctggctgtccttatcgcaatgacatcagagttcataagacttgtagtgactctttccaataagtttggtccgacattgattgtatttgtagactccagattcttcatggtgtaagcatcttgtttacgaagcagcaccttcgatgaaggatatcccggcggaggaacacctaactcaccacctggaacaagcatactagctatagtcgatgcagataccacgacgtactttacagtcttaaggccaaagtctctagctacctctggaatccaatgagcgaagtcaaagaagatcaggtccggttccacggctcggaccacaccttcaacttgatcacgtgtgagatccatagcagacatcaagagatcagctgatgtcacggggatctcagagactgtctctgtgccaacggggagaccatccacatgagggacggtgacagagcgaaagacaatgttgtgtggaaacagattgagattttccaactgtttcagagctttcttgggaatcaaaaaagtgaccgtatgacctttctcagccaatttgttggcaagaaaaaggaacggggtcatatggcctgttgcgaaccatggatacataagtacatgaaacttcaaaccacccatttctgtattttttcctttcgttttcttgtttctttgtatctctattatgctttggagactaaaaggtctaaaatctatatgatgccgcggttggtatgaaaatatctaacacgtgagtatattagtcggccaatgtcacttcgtcggtgctgtctcaaaagttatttactatttgtttaagtactttggtaagtgcatgtgtaacttggaggaccattaagattaaggtcattttactacttgattacttcttttttttcattgcttttacgttcttgattgttactcgtcctttccccaaaaaaaaaagatttattactcgtcacctttcactttaatacgatggtgacatgtatttttgttatgacccagtccagcgttaaatcaaaattcttggttgtccttgcgtggacacgtcgattggtccgttaccattgatttagatggtcggcattcatttatctttgacaaaatccaactaaaaagtaaaaacaactgtcatcttttactactctctcttcacaaatatctacccgtcatcataaaaaagacgatagaccgaaatcacctttttgtaaagtttcatccttttctttcctttaaaaataaaacgaaatctaacttgaatttaacaaaaaataaataaattaaggcattgttcatttatgctgcgagttacagcaattggtcacctaccaatatttaataagattccgttctattataccacatgaaaataatgtttacaaagcctttagtctcaattgctaagtagcccattaacacagtaatttgtaagaagcagaaattgactcgtaaaacaagtactaatcgattgaacaagtggccgtaccgagaatgatttgtggcgtaccaagttcttttgtcacaaacttcatctctgatatccaaccagtttccatttcccaaaagatctactagagtaatgtgtagtgagatgcctaatctcacaggcctctttatttccaagtagtgtgtctcaggttttaattgttggactagaaccaacaatttctcctatttcccacatatagccttatccatgggtaagcgatttcccatagcctcaaaagtatattggctagttatgagaatatatatgttttagtgtcgacgctacagcaattatttatgctgccatctaagaacctcatgagataccaagctaaccaaatggagcattctttacataggaaagcactacgtaatgaattcatagtggcttttatgcaaccatttggagggatgaaggagttgcaccaaaatttggatattactgcaatcagtgagttaagtagctggaaccgaatgcaaaaggtaaatatttactagtacattcttcattttaacctctgcaacagtgggacacaattagcaagagaaatatttttggtgcatagaggaacctctatatatctaattggcatagttgtgatatatatgtctcaggacgaagacgtttacaactttttcgagcccgagttgatcaagaaaactaagtcgcctccttcttcaggtagtgactcccccaagaaggtatcatagaccatcgttgaattcaagggagagaattacttctccgtagctattggacaaactcacacaaagtctcactgtttcattgactcatctgatgacgttgtgtaactcatccacaagctttgcactcacaacttgtatgattctctctgtaacaagagatgtttgactaaagtggtactattgaagattctgattgcaattttggcactctgataaactcatttgcatcgtttttctttcttttctatttcagtttgtttctttgtatctttttgtcactatcttccctctattccctaatggatttataaactttttcctcaagaatctttcttgtgttagaagctaactcataaagcaatcttgtgacaaccaagaaacacatcagtctaaaagccaactagaaaacagaggtacttctacatagtttgtttattaaaaaagaaaacattaaatgatcactcactgcaacttagaaacatcaaacaataaatgaaccatacaaacaagaaaaaacacacttggaaacataagcacttcaagatagtttggtttatatcaaccttattaatcacccccttctacttagaaacgtcatagtgttcctatctttcagtcatgggtggtcccagagacaagatcctgcaatgactctacgaaagcatcgacataaccagtcattagtccaggactagctactgtctccctccacttggtgtgattcttcctcaccaggttcccgagctcgctgtcccttttcatcacactattgacagcatcgcacaagctctctttcgagaaccatcctgtttcctctcttgccacttcaaccgaaaccttgagttcgtcactcagcaatcttgtgttcaggacttgatcacccaactgtggtactaagactatctgacaatcactcagcaaagactcccacattgatccaaacccacaatggctcacaaagcacccgactgatggatgagacaatatcaatggttgttgaacccatcctccccaaacaaggcctcttcctttaacccgctcttcgaatccttcaggaagtgcttcttgaatcgttgatgagcctctagggggcttaaccgctacaagaaacggtgaacctgttagctccattcctaagcagagttcttggaattgatctttctctaaaatgacttgtgagcccagtgcacaaaacaccactgagtctggttcatacccacttagccacttaacccatcgttcctctagctctctagtcttgtctggctcagggaacaccggacctgtcaagagaacctttttcctgcaatgtttttctatatagtcgcaaaagtttccttcgatttctctggctgtccttatcgcaatgacatcagagttcataagacttgtagtgactcgttccaagaggtttggtccgacatcgattgtatttgtaggctccagtttcttcatagtgtaagcatcttgtttacgaagcagcacctttgatgatggatatcccggtggaggaacacctaactcaccacctgggacaagcatactagctatagtcgatgcagacaccacgacgtactttacagtcttaaggccgaagtccctagctacttctggaatccaatgagcaaagtcaaagaagatcaggtccggttcaacggctcggaccacagcttcaacttgatcacgtgtgagatccatagcagacatcaagagatcagttgatgtcacagggatctcagaggctgtctctgtgccaacggggagaccatccacatgagggacggtgacagagcgaaagacaatgttgtgtggaaacagattgaaatgttccaactgtttcagagatttcttgggaagcaagaaagtgaccgtatgacctttctcagccaatttgttggcaagaaaaaggaacggggtcatatggcctgttgcgaaccatggatacataagtacatgaaacttcaaaccacccatttctgtatattttcttttcgttttcttgtttctttgtatctctattatgctttggatactagatgggtctatatatagtgccagggtttggtgtgaaaatctaacaaggcctacctaactctggttgtgttctctcgatagttattaatatatacaccgtttggttgttgctgacatgattctcataccaaaacataacgctggttttcccatttgctgctttgattgcttatttatagttgtattactggtcgattgagccttgcgtagacacgtctgattggggtccgttaaaattttaattgagcctcgatatagatgcgcactagatgtatccatggtggcctgtagtatttgtttacgaccaataaaacttggggtgttcggtaaaagtgtacattgccttctccgaaatccaactaaaaccgtaccggaaatttaatatccttgctataaatgcgtggtagttggaatcgacatgcaaaaagaaccaagattttgtaggccatgtactcattcttcattttatcctctgcaaccgtgggacatagaggaggaacctctagtctagatatcgatctacttggtgccaactgaatgtcccagttttagtgttgatatttacacatcataagctatataaaaaagaattgtaatttttcgttaatcataatttactagaggcgggcacaacagaatgtacatgggtattgtacatattgacaatagaacagagatgaacatacgaataacaatgtgagaaacacttgcacttgcacatactcatgattttgagatttgatgaaatgaaaatcaaaggatcacgagaggggcctcatcggttttagcagcaggtgtggtctcttgtgctggtggctcagtctcagaagatgttttttcttctgccttcacagcttctggagttggctcagccttggttgcctcagaggagtcctcttttgtctcaccttccttctttgtctcttcaatggactcttccttcttctcctttaatcaacaatcagcaacaatagttttaacttaatatgagtttgttcaatcaagaatttgtagtaaattctgtttaattggtaaatttcatgttattcaattcaagaatctttaagatcatctactaaattatttagaaagaatatattggactcacctgagttaatgtggcatctgtctcggtcgcggcattcttggactcaacaacagcattttcggtcgagacagagccttcgacgatgtcagattccttaggtttgctcgcacaggctcccatggtttttggattgaaaggattagtttggaaaacaaaacttacaatgggaagagctgtggagcaaaaaaagaaagaaagaaaaggagaactcctctagacaaagctgactttgaagaggccaaaactctttaattttataaccggaggctgagcaaatggaggagagggctgtgaacagattcatacaggaatcgtatggactaaagctatttcaggtaaagttttggttaatttcagaatcacaagtcattacacctttgattctctgtgaggacctatttatccggaggacaacttttatctccaccattcttctatatcctgtttagggggcaatggcttcttttctgctggcaaattctgacatctcatggattcacaagctcctcctggttagattgcaatactctgcaaccgaaccgaataataacgggtacaggtaataagcaatgcaatgggaataaaggtgaataagaacacaaggaccatgttcataacaaatccagtaggaaaattcttatcggagaacagatgttcagattcgtttctatatgcaaagtgatgatattctagctattcaaacggaaaagatggttactgcctcatatttgaaagatgaaaaatggtttccagttttctcaagcccaaagaatttatctcatccccggttcggctgcctactgcggatccttgttgcggttctgaagagaaaatcgtggttcaccggtgtgacctggtttctctgtgtcaaatgatattgagcctgatcggttattagagccttctgatatatgtttctcacccatgtcttccaactcttccaaatctgtttcatcaagtgcttgtgtttcttggtgatctttgcttggaccattgatgacaaggcttttgtacattgttaaagcttgagcaatcatgctagcaggatttgaagcaccacttggaagcaacattatcgtaccctaaaccccaaaaaaaaacaaaaaacatgaacattacataagcccgagctatgccaagagactggaagagattacagtaattgatttgtttttacctccttggcaatgttaccgaaggctgtaatgtattgctctgcaactctcaaactcgccgcctgcaaattttacagtgacaccgtatgagatcatattttggacagaaaaagttaagaaacctaaacacagcaataatagtgatatgacttaaaattccaaaagttggaaagttcaagaagacacagaaccctttatccaaagagaataaagacgtacacatttagcaatttgtgtaaatactatgaagaattaattaatcaaagctagttagttaaatcaaaactatgaataccaatattctgcttgatctcaattactcacctctactcccccagtttccttgagggactgagataacaagaccaggcctttcgcagttgcttgtgctctagctagtattgcttctgcctcacctgtagaacatcatcaaggataatataagaaaaaaccagtgggagatagcaaccatattgtgcattagcagtaacgaaaatagttcctcatgcaccaagcattcatcagtgtacagtggaaaaataagcaaatgaaaactaactttttcttctagtgaaactaactaacaatggacataacatgcaactctgatgtgttctcgatcttaatggctcactaaccttgtgctcgattcacctggtccatctttgctgcttcagatgccaagattacagaacttttcttaccatcagcaatgttgatatgggattgcctttctcctgtcaaatttagtaaagcaatgattagaaacatgctaagcaggcctcttcttttccaaatgcaaaaaacgaaactcaaaaggaataacagatagattttagccaagaataacattatgagccgtagcaagcactgctcagtctcgaagatgagttctcaaagacaagtcagtcaaggttaccttcagactcaagaatctgggctctctttttacgctcagcttcagcttgcatttccatagcagctcgcactccatgagggggcataatatcccctggaaaaacatgaattagaaataggaaaaaacagatatgtaactatcaccggaaaagaaaaaacacgaacaacttacttatctcataacgaaggcactgaagaccccagtcttttgcagcaacattgatggcttcctgcaagaatatatatacatctcaaaaatccatcatatattttcttcttcaatggatatacttcctctaaccatcatgtctccttatgatttgaaaaagagacgcaaataagttcggatatccaacaaatacaacatgactaaatcccccagctgaatctaaattccatatacccaacttgtggtatacaaacacactgccagatgtgactaatttttccaactaaacagctcaagccgcaatgctcagtagggagtaacaccaacagcaatattcaagctaacgtgacttgactttgaaattgatcaacttagcggattctaaattctttgaaatgcacaggagcttaagtacggtgagtcctaacacttcaaaacagagataaagaaggctggagaacaaaccactatcttctcgttgagagtgtctcgttcctcaaaggtcttatcaagagtgatcttaccaagctcactacgcattgtggtctgagccagctgtacaacagcatagataggactctcaacgccataagaagctaacttaggatccacaatctgcaaaaaaaaattcccagatcaacaagaagaaatcagtaaagaatcacaaaagtaagaactcaaaacaaaaaaaaaaaaacaagaggaaaatggattggtgaaagaaaagaagatgaccttaacgtagagaacaccatcgatgtggatactaacgttgtctttagtaatcgcagtctgattcggaatcgggatagcttcttccttgagagaatgaacataagcaatacgatccacgaacggaatgaggaaatgaatccccgacggcaacgtcgtagcgtatttaccgaatcgctcaatcacaaacgccttcctctccggaactatccggattccccaattcgtcggcggcgtcaattgaaaactacaacgaacatccataaatcaatcctaaggttctctactctaatctaaaaccaaatgcttcaaaaacgaaatcgtaaggtgagaaacataaatgattcaaaaatcaatcctaaggttctctactctactctaatctaaaaccaaatcgtcaattgaaaactacaacgaacatccataaatcaatcctaaggttctctactctaatctaaaaccaaatgcttcaaaaacgaaatcgtaaggtgaaaaacctgttggaaggatagccggcggaagtgaactggcgaacggttgaagcggcggcggagaaaatcggaggtggagaggtaacggcagattgacggaggtacgaaacggacctcaaggcggagtaaccgacggagcttttacgaacgaggtggttcatcttcgtgggagaatcagaaaaatgatatgtgaagaaggaaaaaccccaaaacaaaacctcttataatgcgtagtcaatattcaggtactgtttcttcgccggatcacgaagatttcacgcaatatgcgtggagaggaggcaaatattttattgggctttagtggatagtttggtacctgctgttattattgggcttatctctagcccattcagacgcctgaaatatccatctgttattaatttattattcattgttttggttgttattttaaagagttttttttagttgaatccaaaattcattgtgaatcgagaaattgcaagaaaataatggctccgattggtaaccacttttgaggaaaacaatgaataggaaagtcgtgttcctttttgttcctcggtattttttaccatttgcaaggaatttttgatccattttcagacaggtggatcctacatttttcctcatcattcctcaaaaaaaaagaatgatagaacaaaattgttcctccccaaaattcctattgttcatttctttggtcaccaatcggagccaatataaaaaatttgggtaatggtttcttttagtttctaaaaatcatgtaatgatgtgagtgaattataatgaatatttatattgtaaggaataaaatacatattttatttcaagaaaataaacttatatcatgaaattttgatagttgtagatagtcattaattcattattatacgacgttttggatattgaaaaatttagacattacaaaagccatgaaggggtgttaaactttactataatggaaaaaagcggtttaaaattcagaatgcatggaaaaaacaagtctaatgggtttcacatggtgaagaactgtgtgtgagtcatcaaagatccggcgccgttcccttttagatataccgacgtcaagaaataaaatggcaacaattaaaagcttcgtaatgacgaagcgcatttcacctttcaaaagtgtcttctctttcttttgtctaatcttttctaagaaaataatttctatcttttgcttagatttcaaaagattcaatccaagttttcttttggtgggataaagtaaaagatgaacatgtaacatgggatccaaagtctaaagaaggttatattttgtgaactatatctaacaaagagaatagtggtgacacactttacactaaatccaagtcactagatcctaaaaagcttataacatgacgacttcaacaacatgcacctcatctcttctgcatgaaacccaatcactgtcgtcaatatatatatgcacacacctaagttcgtgtatctctactatatataaaggtaagtgtgcatagtttgagttagaaattggaattcgaccaaaatacatagttaaagtataatgggtgatcttcaaatcgtgccggtgtacaacaaggtggaagcacagtacgtagaaatgatggtgcctttgtattcttacggttgcgagaagaaagtcaagagggctctttctcatctcaaaggtacgtaatcaatagttttaatggttatgatatcatagacgactatgcataaataattaataagcttattatattttctttataacgaataatcaggaatatattcagtgaaagtagactactacaatcagaaggtgacggtgtgggggatttgtaacaaactcgatgtgttagcgatggtgaaaaagaagcgaaaagaagctcggttttggaatgtagaggaagaggagaataataatccagagagcgttgatgattgcattgtcgtaaaagaagacactattattaaaacttcatttgataccgataaatcatcggcgttttatacgtattctacaacgcctccgagattcagtataagacctcctatgtcacttattagaacctcttcattcacatggaaagccgtgaagaaggtcttcactagatccctttccttttgaatcacgtctatatatgactctactaagtttctaataaagctccaagaaatcacgtacgtaactttcattggatctcttaatatatacataaataccaaagtttctatatagttgataaggtttgcatctcgcaacggattgatggtacgtagttcaatggtcaccgcattgttcgtaaaatctttcttgggacacatatgtaattcagttgtatgacgcttatcaactctgaagttagtttatattcgaatgtctttaattttaattatggttagtctttaaaacaatcataagaggttatcaagaaaaaaaaagaccgagtctttcgagaaaaataaagtgataacgctttatcttccagtccactgtactgaacttaggagatcatccactattttctcggacaaagccctagttcctctttcagagacagaggtgacagacacaaaaactataataagaactcgcagcggaagatcaaccaagaccagatctgttccctcgcatccaattcccatcgccgttgcagaatcagcgaatccagaatcggacaatgactcggtagctacaacaacggaagtgagaactcaacgtcgtcctcgtcagagcgtgggggagtcttctcgtcccaagcagaacacgctgaacaagaagaaggaagaggaagagaatgattcgactcaagtgatcgacgaggaagaagaagaaaacgcaaggcgaaagaagcgttgtattcataatctccgcaaggctattcaaaatcttaaggaatgtgtcgacattcttgaaggcttcgtcttttaacgatgactctctttctctgcatgttgctctctatctctatcatgtcaggactcttggtgttattacttcttttaggttgtttctatgttatgctttgtaagctttaacaatggctatctctttgtttgttatatataaaaatcagtcagttagatcaaagacctttcattgaatttggaatgttcagttgcaacagagattgtagtaaaacatcacatctacctctatttctggctactgctcttctttttcagtaaatttccaaacttccgaagcaaaggcttcttctttttctgttgttggtcctttgagaccacatcttctgtttgttctgctaaagacaaaccattacttaactgatcaaagttctcactaccttctgctttcgagtcgacttcttcttcagcaaagtcatgctctgtgtctctctctgaagaagcttctctcttttctaaatgatacacttcgctttccacggtgtctttatctttacctttctctccttttcctattacttgaacgttgtgagctgaccaatgaattgttgtgtcatctttcaaatgtctatcaatagcttccaaaggactttcttgtactttttgttctccggtactgttatcaaaaggattggtattagtaatctcttcccctttctcatgtgtggaagaagcttcttctagcaacttagataactcttcgatcttcttaagtgcagaagcctctctggccttgagctcatagttatcgtgaattacggtctgcaattctttgtcaagtaaactctctttcatctttgacaactcctctatcctctttgcagctgaagcttcccgcaccttaagctcctgattttcgtttcccttatcaatccaactctgttctagatgtaacaactcatcaatcttcttcaaagatgatgcctccttggccttaagctcctcatttgcctgaaaaacaccctccaactcgttctctttatcaagtaaactctgtttaagatttttcaactcttcaatcttctgaaatgatgatgcagcttgggccttgagcttctcgttctcaacaactgcggtcttcagctccttttctttatcagccaaagtttgtttaacatcggacagctcctctgttgtcttaagcgataaagcctctttggatttgagcttctcattttcgaaaacaacatcttgtaactcactctctttcacgagcaagcttttatttagatttgatagctcttcaatcttcttttcggccagagagtctttggctttaaggtcctcaatctcaagaaccatatcatgcagctcattttctttatcaagaagattttcttgcagctttgctaactcttcaattttcttaagataagcaacctccctttctctaagctcttcattttcttgtgtggaactctgaagtttggcttctctatcagcaaagatttcatctacctttgataactcctcaatcttcttctgataagcagactccttttctcttaactcttcattttcctgaacaacggtctgcagtttggcttctttctctactaatctttcattcgacaatgacaactcctcgatctgcttaatattttcagcctccctttctttgagcacctcaacttcttgaatactgctctgcaatttggtttctttatcaaccaatctctcgttcactgctgacaactcttcaatcttcttcagacaagcaagctcccttcttctaagctcctcagcttcttgaacagtgctcaacagtttggtttctttttcaaccaagctctctttcgccgctgacaactcttcaatcttcttgagataatcaatctccttaactctgagctcctccgcttcttgaataatgttctgcagttttgtttctttatccaccaagctttccttcacttttgacaactgatcgatcttatcaatagaagaaacctccatttctctgagttttctgttttctgcagcagtgttctttagttcatcttctttctccaccaagctttctttaagtttcatgctgtcagctttcgctacttcaactatttcctgcagatccttaatctcctcctcaagttccttacgattagtttgcattttggcatcttcttcttttgcggcacacgcctcaacttccttaagatgaagcaaattcttcactttgctaagttcttcctgcacagagaaatttccatcttccaatttcttcacacatagcatcaaatgaagttctcgctgttcccactcagtcttagaattaaaaaactcattctcagtgttttccaaactacttttcaggccatcaatctcgtttcttgcatcttcaagcattttcccatgcttttcatttgtatctttctcagccaacttcaaactttcaatctggactccacaaagttcgagctccgcttgacatgttaagagcttctcctttgcttcctttgcttcaacagatacttcttgcaaatccaaagttaaactctccatagctttcttgattttctcttcttccttcttacagttttccaactctgtcgcaagttctgtcttttcacttaataggttctgaatctgtgatgttgcagtcttttcattcagcaaagctctaaccttttccccttgggtggtttcaaggtcagattttattgactcaacaagcttctcaagtttagaagtttcttcttttgaaatgcaaacctggtgttgagattcttcaagatcattttcctgccttccaatcgtcgtcaccagagactcaaccttttcttttaacgtagcattacccaactctgcctcatgaagtgcatgattgttttcctccagctgcttcatagctaaatctaaagattctgaagcagatgtctttaactcctttgattcttcaacttgtttatcaacctcgttcttccactctgctgctaagttattagcataggattcaaccatttttgcagcttgaagatcaacgtggagcagttcaatggactcttcttgatccttcagcgtattctcgaggatgctaactttctcaagtttccctctcaacatctcaatttcagacttcagtttagacacaacctcatcatcttcattacttttcttttgttcatctgaaccaaccaatgcttttaaacggcttaactcagaagaaagaatctccgccttctcagcctgattttcagcaatcttagtcgcttcctcggcatgactgagagccttatttttagcatcagcagtcatagccaattcttgtttaatcctgtgaagctcttctgtggtagagagaagagctgagatgtccaaagcatgctggcttctaatagactcaacttctttcttccaagaaacttcctttttgtgaactgcttcaattcccgcctgttctagttcaaccgctctgaatttctcaatctcagaactcttctctgcgtgatgctgagctgccaatgcctctctcagtttctcattggcttctttagtcagtttctcagattctttaagatcatcaagagctttagctttatctttcttgagcctttctatttgctcattagctttccttaaatcctcttgagtttgttgaaccagtagcccagttcccttccctaaccgtgattgcgatttctgaaatgccatacaaatgatgatcaagaaatagtctttcaaagttgaaaatcaaaacacgtgaagcatcaagttattggatggagatggttttacttgcctcaggaggagtaggaactcttgcagtccgacgatcagaaacaggcttggagttaacagtttgcggtgaacggtctattgaaagacgagtgctctgcaccggagatggcgaattgccatcggatttagtcactgttggtttactcactcttggtgttggtggtgacggtttgctacgaggagtctccattaaaccagttctacatcatcagaaagataaaccacaatgtcacaatctcaccatttaacaataaagaaaacaaaacagaccatccatcatctccattcttcttagaatctttggattcatgattaagtaagctaggaacaggatcccatctcagtctagagatctatcaaattatcaataattaagatgaataaacatttaggtacacttcaactgtatccaaaaaatcattgttacatagtacatggactattggagaattccgttaaaagtgttgggagtctcacaaaacggaagatagagactttaaagacaaataagtctacaagtgactacagaagaagcttctgcaagatctaaaccaatttgtggaaccagaagcagggaaaatcagattaaaagtaacaaaattaatgcaaccaaaacaaaaaacagatgactgaataattccagaagaaaaaacaagggaaggagaaagtgacccacataaaaatccaacaaaacataactacatttccgacaaagaaaacagaagacagagatttcaaattgtcttctgagttaaaaactaaagtttggttaattatcctcacttggttctggacgccattgttgccgaagaagagcgtcctcaaaagaaaaaagaaaaagcgaattgttggctgctaagattcaggcattgatatgggagagactaaacagagactctacagatcgattctgtttctcttcttcttcagtgggtaggattgcttctccacaaagtcttcaacttttttaacacaacaaattcttttcatatataaatgcaaaaaaacaaaaagaaacaaaagaaagtgaaaaaataattgggtaatggggttatggtgtttcccagagtggttaccctcgttctctctctctctctcgtctttttctttctctttcccggtttattttttcaattatatttagtaaaatgataaaagtagaagaatacgtgggaagtgaaactacgaaaatggccatggcttaaagtgtttttgcattgcctgcatcaaagggaatgaatatgaatggacgttgctcattatgtggatagacaagtaactctcgtaatcttttttttgttaaaaatctttagatccatttgattttgggtcatgtggactgcatgtgccttttcaatcatttatttattttccaataattcaaccatacaactcttatagtattctgaaatcataatctgttttttttccctattgaaatcgttgaaactatattaaaattaagatttactagtatgttacatgttgctattttatgcatatgatatggatgcaatttcggctgtacacgtaaatataataaaataaaactggtggattacttcgtataccacattagtgatagaagaaacaccataatttattcatcttagtaaaaataatgacaattattttcaacttagtgttaaagtgttcaaaatgtaatcatatgaagggaagggattatatactttaatcatgggttttgtaaaggcctgggcgttttaaccgaaccgaaccgaaccgacccgacccaaccgaattcaaaccgacccaaaccaaacccaatctaagactcaaacaattcggttgtattttatctcaacccaaatgggtcggttcggtttggttttgaaccaaaccgaaccgacaatccaatgtctttatatacttaattaattaattctataaataatattacaaataactctaaatatttatttatctctaactaaaactctaaccctaaaaagtaaaaacctaaggtttacttctaacttcgtttcatttgttcttccgtcgtctctctctactctttacagccacggtatgatttttaactactctctagcaatacaattacgctcatctcaattttaattaaatattatgagtatatgatgattttttcaatctgtacgtacaccgcaaagtcatggaaaagaaaaatctgtgtttgcgttgtcttgtttcttctatttacttagattttttaatttttaagaataggtttcatgtaggttgggtgattttgtttgtttacaatatatataatatatcttagcattcataccaataatcaatggattttcgtgcaagaaaacagatcaaacatgtttatttagtttactaataatgaaagatgttttaatagaaacgtaattgtattctttcaattgactaacaattttatacatgttttgtttgtagatgtctaaaagaaacacgactagcaataaaagaaaagaacccgagtctccaacagtgtcgccaaaggcaaaaagaaaactacctacaagatcaacagcatggaaagtctttacgaggttgaaagatgatgataatagttgctcatgcaattattgtggtaaaatctattcatgtaatcctgttacatgtagaaccagcaatatgaatacacacatgagaaagtgcaaagcttatttggatcatcttgaatctaattctcagaatgtcatagtctctagtggtggtggtaatggtgctggcatgataaaaccttttgatcaaaacgtgtgtaggcaagcaacggtaaaaatgattatcatggacgagttgccgttttcttttgtggagaatgatgggtttaaacatttttgtgagatggctgtcccttggtttactattccatcgcgaagaacaattactagggatgctgttggtctgtacagagctgaaaaaactgcattgaagactattttaagtcgaaataggcaggccatgtcgtttaccactgacatatggacttctattacgacattgagttatatggtcgttactgctcattttattgacatggattggcaattgcatagaagaattattagttttagtcctattcctgatcataagggaaagaccatcgccaatcagtttttaagatctttggatgattggggtattgagaaagtattttctatcacagtggataacgcaagcgccaatgataaagctattactgttttgaaagagaggctaagtaacagaaatagtgatgctttgatgatgaatggtgattttatgcacatacgttgtggtgcacacattcttaacttgattgccaatgaaggtcttgaagatataagtaatagcatcgtaagtgttcgtaatgctgtaaaatatgtgaggtcttctaattaaaggctggaatcatttaagcgttgggtggaggttgagaagataacaagaggaagtgtggtattggattgtgttactaggtggaattctacctacttgatgttgaaaagtgcacttaagtataaagttgcatttgataggatggctgatatggataaaccttatgatgcatggttcaaagaggttgattctaataaaaagaagagggacggacctccaatggcaattgattgggacaatgctcgtcatatggtaaggttcttgaaagctttctatgattcgactttagcattctcttcttctataaaggtgacatcaaatggttgttacaatgagatctgcaaaattcagtcaagtgtgcaaaaaatggcttttagccaagattctgatttgacagagatggcttctgcaatgacggccaagtttgacaaatattgggaaggtacagaaaaaatcaataagatattgatagtggctggtgtacttgatcctcgtcgcaaaatggtatttacaatgttcagttttgaacttatctatggaaaaggtaatccaaaatgcgttgaaatgaaggaactcgtgatggatgttttggagaaactatttgacatatatagtgttcgatatgccacttcaaatctacaaccttctgtttcctgtgacgctgagaacgtaacccaagtacaccaagactttgagaatatggaggttgacaacattgatgatccttttctaaaatttatggttgctaagaagacttctgtagcagtggtaaatgaattggtaaagtatttaaaagacgaactgcatgtaactactgaaaatagtttggggctcccgtttgatcttctagattggtggaagacaaatagctcaaaatacccaatcatgtctttaatggctagagaggttcttgcaataccagtatcttcggttgcgtcggagtctgcttttagcacgggtgatcgtatcctagatcaatatagaagttgtttgactcctgatatggttgaagcgttggttttgactcaagattggttacgtgcttcacttcgttcagaagcaatgaagtctcttgataagctagaggaagagaacaagtttatggattcacttgaagaaggtattttactttatttctttataataattatatgtgacaatcacttatagatttactctctgttcatgttagtgtctaatttttattttattttgttagagtttaatcctccatctcagaatgagaagtgagagcgataggtacatgtctaagtaaacgattagtgggagcagaaaaagattaaagaggtaatgatctttcctttctatatattagttttacgatgttggtgctatctgttgttgaaaagtttaaaattgttaatttatgtttttttctttctgttcttaatagtttatactctgttttggtttccaatattctagttaatactctgtttcagtgtaagaagtgattggttttattgttttcgtttcgtctttatatagttataaacttatatgcaagttattgacttgttgcagattcttcttgatgacattgggtgaaggaatcatggaagattgttatgttacgttgttggatttcttgcattttcctttcttttaaattctaagtactaggcatttgataattttgatttgaacttgttacgttaattgattttttgaaccagattaaaaccgaactgaattaaaaccgatccaaaccgaactgaaccgacctagaactaacccaaacacaaaccaaaccaaactaacttcggttgactatggttagagttttacaaaacccaaataaaccgaaccgaaccgaacccaaaccgaacccgaaattaaaccgaaatgcccaggcctcactttgtgttttgtctcttttgcatctatatcgatacaattaaataataacacaattatggtaagcagcacaatgaatggagttgagtaacaatcaaactaaatcaaagtcctagtactaccacctacatttatgatttgtccttaatcattctagtttagaacttaattagatcgcacgtcaaattgttgttcgttgatcttttattcgtatacttgttcgtctcctagtcgtaggtgagatttttctttccatgtaatcaaattgttgatgcttggtttgctcgtaatataaaaaaaattgctgaagcctggaaatgatataattttcttggtaaaggtactctcgcgaatgaaccttattgttattaatatcgtttatggaattggatccaaattaatcgcttgagaaacctgagcagtaaaagttgaagctaatttacactttttaagattttgattcttaaccacgataaattgggcccataaatgaaataatgggctaacagagaatcagaaacagaggcccattttaatataagagataacatcatattagtcccacatcgcttatacagtaaaacgaaacagagtttatatagagttagagtcgaagtagtgcttgtcccttcggggacatccgataaaattggaacgatacagagaagattagcatggcccctgcgcaaggatgacacgcataaatcgagaaatggtccaaattttttttgtaaaattttccagatcaataatttacatgaagcagaactctttcttgtttcagagctttcggagagctactctaagcctctgcatgttcgaaatttcttggcctaccctctgttaataacttcaccagtgcgaatcatatagaaactggacaagattctgtcttacaaaatgtctgagttttgttataacactgtcaatgctaaacatgcttatgggatttcaattttgcatttcacaaaaacttaataatagtttctgcaagaatattctatgagaccatcaaatcaaaaacaaaaaatgtctcaaactttgtcggaaacatatactatatactaaaatgttacatacaagattacaagtcaattgcaaaaggcactactacatgaagacaaagaatgaatcaaaaagctaaaaatcacaagctaaagaggtttcatcaagacccaacatctgttcgaacaccagaaccattgagacggaaggcatgtgatcgagccagctcaaccgcgtcctgaaccctaagcctggttccttgttgacccaccacagttgctgcaatcgttgcagccatatctcccattcctttcaagtcagagacacccctcaagataccgtataagatccctgaagcatatgcatctccagcaccacatgtatcaactggcacgcatggggacggaggaatgtagatggcctctccttttactccaatatatgacccgttgattccatcggtaacagaaacaaacggaacaaagtggctcatgtatcttgtcgctgaaattggactttcctctgcggaaaagtgacaaaacgctcttgcttcatcgctatttgcaaatacaatatccgcatagttccccacaatgtccctgaatcaacagaaaaccatcagcatttatctaggttcaagtttcgttttttcgagagacattcacagcttgaagcatcaaagcttctatgacttatcaagctacagaagataatcactctcttcgtattatttccaactgttcctatccgatggaactgacccaaaatcaaatagacgcaagaatgtattcaagtaaagggagaagaaactgaccagaaatcatcataatgcctctctatgcaggacacatctgatgctgtcacagcaacaagtgccccgtttctgtgggcttcttcgcaggcttttgttatggttcttatagtatcaggaagctcaaacaaatagccttccacaacaaagacatttgtcttggctatcaaactagccaaacaagaatcataattaacgacagaggatgttccctgaaattatacataacattaggtttgttatttagtgggatcaataaaactgaaaaacttatcagagttaacaatgctactactatctcaatgtggttgctttatggaagcaaatcgatcctaccactacaatgatcttgcacgtcatctacttcaaaagttaaactttgctcgactcttgtggaagaagaaagggaaacccttacattttgaatagtaatacattgcaagagcaatttgctgagatcagaaatcctacctgatatgcaagcatagtacgttgtgcatcaggagttgtgagaactatcactgttcctgttgttccgtccttgattggagcagaaagaaaatttacatttgctcgtcgtagtttagtcctatagaaacaaaaaaaaaaaaacttgtgagtataccaaaccaaatgtaatgataggctagtttgacgccttacaaactactcttgtatagtaacgattctctacataattccatactccaattcttaagaggggaataaaaagtagactatgtctaactacatacacaattagccaaaaaaaaagagaagggccatataagtaagacagtttagtacccgtaaaagctaccgagagggtcacctccaatactgccagccattgccacattcaaaggccggtcacagatggattgagaacctaatcttgcgagagcaactaaagtgttggacaatgagcctccagctgccgccttatagctacaaccatccattgcttgtaataatttacccctctcctcgtgattaatcagtttccttgttcccttttctaaaccaagtttctttagaaactcatcatccacaactccagagaaatctacctaaaacataaaacacatcatcaataaccaagtaagtatttttaggatccagattcacatatttcaaccatttggtggcttcaaggataagaagaagctagaagctagaagctagaatgatttattataggaaacaaaaactcaccatggcttggccgagacccaaaacatcccatctctcaggcgaagcagcagaggaattattagcatggacttgtatgaattcatcgtcgtcttcgtcttcatttccaatcctctggatttcaccttcatccatatcatccaattcagcaccggctccgccaccaatcctacaaaccaattgcctattctccgccatggaaacaatcctcaagttcccagaagctccgaaaaacgaggtcgcggttctggttcgtaaggttcctttggggtgatataaagagtaaagacgggagagagaggaggaggaagcattattagaagcggtaatggcggagagagtgaaaaaaagagaggcagaggtaggaattggagagaggagggagaacgccatggaattagatagttttgctctttgaatgaagaaagctcacatctccattcaaaagcgagaggagcaaggaagaccagcaaaacccgagagacggcctctgagaggataaagtatgactttgactttatatgtttatttatataaatcttattaggataaaactctatttcttatttatattcaaacccaaaatttcagaataagcataattgctaacaattttattttaactgtatcttaaaaataataatgtatgttgcgtctatttataaatttaaaatttgtttatactatttatcatttgtgttaaaattggctaattcttctagtgaacacatccttatacgtggcgtttgtaattatcgggttagttaccaattacggagaataaaaaaaaaaaaaaagtagagagctattcccgcggtaaattcttcaacaactatctatttacctttacaccaaatgttgaaagaaaaaacagaatcaagacattcaaaaacgaaagcagaaagccagaaagaacctgaaaatcttgatctccaccgttcttagtacatactaagattcattttctcgaaaaaggaaaaagaaccgaaaaaaaaaataagagacgcaagtatgcacaatgcctaacctttccacctacaataagttttggagctgtgagtccagtctctgctgcaactcttttaccttctgcgaaagctcaatcttctgctccttatagcttctaagtagatactctttcccatctatcacttctttaagctcactcacttcctttctcaacatctctactctttctccatcccttaggctcttttcttgtgactcataattgctttcgctgtccataaacccgccattccaaggtccaaccggagatgtcttgccattgctgtccgcgccacatcccacgctgtgatcagcaattgcctttctcagtctttgaacttctctttctgattcaaacagatctctgttcagtgtgtctagctgtgcctggagatggcttgagtgtgccgtctgtgcgttatacgagttttgcagctctagaatctgttcttgcatttcctgtatcatgtcatcccgtctcttcagctgctgccttagtttctgtattacttctcgtttgctgaaaatgtctgagctggtttcagatacgcaaggagaatctgagcagtttgaattgtgattgtatggtcttgggggaagttccaggcgatcaggagaagttgcccacatgactccattctctttgctcgatggagcaggaactgtcacaagaggcagtgaagtgtcagatgcggatatcatttgctcgcttgtcacctcttttccttccacactctcagttcctataaaaataaagaagcaaaggctgataagatccatacacgactgtttgctctggactacatgaatattaggattcagagattttccaaagagaaaacataactcaggtctggatctaatagtacaaaacttgtaactatgcttaacgaggtcttggtagataacaaaactagtaactgtttttagcattcagccactagacacagccatcaatggagaaaacctgcttccctagttgccagcccaattgatgcaaattaatggtaatatgccacaacgaaacaagagatattcgattcaaccagttattgcaaggtggcaaatcttgtaactattttactcattccataacttcgaattggattcccctagttgacaaatacatcatgaggtaagataacagaggctagaactctataacaacatctacacattctcccaactagattttactatatatcacacatcgttttaacttcatgaaaggaaacccagtaagacatgatgcgagaccaagaaacaagcatatagcgtttgtttagtagattgaacaaatatgtatgaggcaaaacagaaagttacaaagtcacacctggaatggagcggaagcaacaaaaatcattattttgtgtacaggaagatgtggtagagtgtaagcaacagcttgtagatttttgcctctcagatgttccattagctgcacaagaggctttcatttagtgatagaaaaaaactagaaccaaattataaaacatgttaagcaacacagcgataaagtaagtacgttttaatccagcagagccatttgattgaggtttcgaatcaagcgactgctttagcttgtatccaaagcgaatggacaatgtgctcaacaatgcaccccctgcaattagtatccagtttggcccttcaccacaaaatttatcacctcgctgatgcttggaaatgccatttcttcgtgtactcattgtatgagaaagtcaaaatgtatctatcatccaaacataacctacattgaacggatacaagaatcaatcatcatcaacgatcagaatgaattgggcatatgtcaacaagaaacctggtgtcaactcaataaaatcaacaaatatacaattttaaaatcatcaaatgcttaatacccagaaagattccagaaactagaatatgaaaagataatgagcacaaagaatcacgttttgagcattacctcaaacacagtcaaccagagaaggaaaaacaaaaaaaagatctaaaatgatagtaacactgaaaagagaaagacaaaaaaaaaaatggaagattctctaagtcaaacattctcagttgagaaagtatacgacgaatccatggaatcatataggagcacagactctacctcaaaaaaagcaaatgcaagaaaaatggagttccctgaaagagtaatcgaaacgttgatgccatgggatttagattctaaaactacaaaagcaagaagaagagatagatacttgccttgaacatgaagcgaaatgaaaataataacaacccttatttttttcgataggggccgttaatcgatatcccaacaacccttaatgaacacaacaatcgcaatcagaaggagaataaggaattacataaatccgagctcgaaaatagattttccgacgaatcaaaaatcagtgagcgagcgaagcacccaaaaacagggagagtataaaggactctttaaaaaacctcatagacagcagaaaatgggcattagggctccatagtttccctcccgagccagaaaatttctcccgcttgagtttcaatgtttgatgggtggtccttgcagcttcgagaatcgaaaaaaatcgctgagagagaaatacgattccgtgaagaatcgcagagtctccgacgatgatatgactgtaaaacccccggggaggagagagagaagcaaagtggaggggaagaggttgaagagagacggcgcctcacagttacagctccgttgttgttttttccttccactgttaattcatttattaaaataaaatcacgcacgcgtcaaccacgtcccatggatgacgctcacggtggttaacaaactcagctcatatgtttttttcttctttcttttcttctttacgatttcaattttttagtaatgaaatttaatagataatttgagtatgaatgaacatttgacatctttatccatgtgtaaatgtttgcactttctgttgattatttttttttttctattttaagtcactaccagctaatgtgatgatacatttttcttttgtcttcttcactatgtgacaactacaaaattaaatatttggtccttccttctctaacgattttcttccttatgaatatcaaaacctgactgaaataagtgccaaattaaattttagcaacccttctttctctttccttaagaacaagtaaccaactttcttgtaaaaaacttcaactgcaattctacaatttaagccttgagacacgatattgtatgagtttgcaactttcgaatatccacttcaccaagagaaaaaaacaatttggataaaatcataattgacacccaaaacaatgtagtcagttgataagtttccccggagaaattgagatatttttgaacaaagattcatattttttactcggggaaacaaaagagagtggtaagaatgcacaatgcctaaccttcttcacctacaaaatgtttgggagctgcgagtccagtctctgctgcaactcttttaccttctgcaaaagctctgttttctgctccttatagctcctaagtagatactctttcccatctatcacttctttaagctcacccacttcttttctcaacatctctattctttctccatcccttattccattttctggtgactcgtagttgttttcgctgttcacatcgccactccaaccattgctacctgtgtgtcccacgcagtgatcagcgattgcctttctcagtctctggacttctctttctgattcaaacaggtccctgtttgttgcgtctagctgtgtttggatatggctagagtgtcccatctgggcgtttagcgagttttgcagctctagaatctgttcctgcatttcaactatcatgtcgtcacgtctcttcagctgttgcctcagtttctgtattacttctcgcttgctgaagatgtctgagccggattcagatacgcaaggagaatctgagcaggtcgaatgttgatggtatgctttcatcggcacttccaggtggtcaggagaagatccccatacgactgcactctctttgctatatgatgaagcaggaactgtcacaagaggcagagaagtactggactctgccatttgctcatttgtagcatgatttccttccccattctcagttcctgcataaatgaaaataagaagccaactctcagaacacccacacaaaacttttctgccataacacaagccatcattgggggataatactacagccttcatagtttccagctcattaacgtaagtagctacttaagtatgaatcctgattggggtacaaagacatctttagtcaaatattgttcctgattgggttacaaagatcattatgcaagatactagaggctacaaatatgtaagaaccatctccatattctttcaactatttgacaacatctcccaaaatctcttttcacttcaaagataccacaaaatcaaaccccagtaagagactatgtgaagtgaagttatgtataagcaaattcagtagtaagaataacaaactcacaaactctcaccgggagtgcagtgaaagcaacaatcattattcctttcacagggtgatgcattagaatgcaagcagcagcccttaaatcttcctctgtcggttgttccattagctgcacaacaaaacaacctaccaataagatagagaatacaagcgaattctaggacatgtaagcactaaacaaccagataagtacgttttaatccaccagtggcattggaatgaggaggtttggagtcaatagactgctttaatttgtagccaaaacgaatggacaatgtactcaacaaagcacccccagcaattaagatccaatttggtccttcaccgcgaaaactctcaaaccgctgatgcctggaaacgccatttcttcgtgtagtcattgtaagagaaggtcaaaaaatgtcttctatcatccaaccttaacactgaagaggaagccacagtctcaagtttagtaacagaacagaggcctttaatcgtaatcaaaccctatgcgaaggaaaaatggcaaacaattgaagaacacagaggctcaacgacaaaaagaaaatcggagaacgattcaaaacaccaaaagtgacgataaaaaggaaacagaaatcggaaaataaacctcatcgggatgggtaatactgcagggacgattctcccagaaattagggttgctaagtgacaacgatcaagtagatcgagagactaatgaaaaagctaaagtttgtagaacaattatgataatcaatggtctctagaagggaaaacgaagaagcttaccaggctgttttagagagacagcgcggcgcagaaacaactactcaaaggccgttgaagcttctttttttttttcttcacccgccgtgaagcgtcccaaattatcttattttcatagtgtatagtactgttactagatattttatttctcaagaatgtcgaatcgaaattggcggaaaaaaaaggcgaaataaaataatgtggaatcgagattactacttaggccttttgattgatattaaactgaataattccttcatgattttgtataatgtaagtaacagttgatttaacctatttcacaaataaaaagtaacgattaagaaatgagattaatataggatcaagattacgacaaaacgaaggatacatttctctttattggcggcagtgactcttggtgatcagatgacagaggttatctcattcctagagaatgtaaatttgttctcaacctatgcactactactgcactaagaagttgtaaattattctatatatatatttctttagatttatcttcgttgttttctatgaatgtattttggaattgaaaatccttggactggatacaatgtgacattgaagtcaattacatgcatataatcaaccgaagcagatattgaacctaacacacgtaccaactccttctctaccacaataatctctcacaccgaatcaaccaaaaaaaaaaaacagtcattttcggttaatgcctcattaaatcattgtggccactactctttttctttttcttttcctttcttttttgtgtgtgtatgtgtttcttaaagtactgcatgaaaaataatgtatgcatataaataaggtagagatctattgaattttatatcagatatatattattgaatggtaaaaccccaaagtctcattctctttacaactaatcacacacacctgaggaagaaaaaaaaacaacaactcaagactgatcctttcaaagcaagaaaatgtacataagtcaacgctaagtagtggtcattgtttcaagtttttcatctagatcaaaatttaatcaaccacctcatttgcaagggaactcacagatgcttgcttagtctattgggtgcttatcaatttgacgagatgtgtagtgcgcagaaagcagaagcagagaaagaaaagcgctagccacgaatattgcatcaaaccatcgatgatagaaatcaaactgaatatctccgcctaatacatctgttattatccctctgtgccaacaaaaacaccattcgattataatccacatttcatcttttcaacagaagaacggttgtaattattgttatagtattatcttacgtacctgtactcatttctcaagctttttcttataagaagaatggaagacaaaaagtacattcccatgatttctgataggaagagcacaacattgcttgaagatccacttccaaccctcgacactgcaaagaagaactgtacaagcgaattgaaaaaaaactccccaattcaatcaccaaaacgtttaacagtattcaaaacaaaagctttcagtatattgcgagttacaattacttagatgtaaaatcactatactaatgccaaccaagaaagtagcctctgtttttatgatcagactgaaattacattgagttgttctgtaatgctactgcaacaaatacgttaattcaatcactctacatcttccactcttaggatatacatcatatatactttgcttaagtaactatgtgactgtcacaaggaaagttagcaccagctaaaagaagtgaaagcctccgtctaatatttaaacatgataatgccagagcaagttttccattgacactatatagctccaaaacaagtggataacatacaagatcgtataaagacgaatgggagaaatttaaaagctgaaatcagaactcaccttcatcagattcgtcaagaatcccctcactgatatcacgatcaacatcccaataaataacagggaaatatactgaaaataataaacaaagagagagcatcagacctacataaggtaagttgagaaccatataagcatcaagataaaaagccatctagtgtaacaaggtctaagaaatgagaaaattcacatcccatcaaaggccctatgaaactagagttattaattgagaaacaataatcctatagcttttcatctggacgatatgttgtaaggagaaagaatattaacaagcctgcttgcaattctttgaatctactactccatacaacaaaaatccaaagtcacacaaacctgtgagagcaatgctgcatctactcctatatcaaagaactgcaagaatatgctgatcatcatcgtgacaggatctttcgtgcccgcctgtaaacaagctaatcactattccatgtcgtaaaaagtaaacaaatgatgataacgctgcaagaatttattgtaaagtgtataagaaaacatggacaagagaatacctccttgaaaacgacactttgtagagactgcagataagacaaacgaaaaatagagaagttagaaatactagttcacagttacaaacttacaatagacaaaacatttgacaagagatataggagatattttcatctaataaaccattactggtctcagaacagctctcttttcaaagaagtaaagaagttcagacaaagaaactccttaatttttgaactctgcatcaatctataacaaaaactaacactgccattgtcacatccatgcggaagagtttgacatagtcttgcaatgctaggataacatagagttaaaattactaaaggctagcacctcacataaagacaaaacaaacctttaacatcttatacacacagtaaatggaacacgcatagccaagaaagttctgcacatgacccttccaagttcgagaaaaagcagcagcatcctgcaaatgaaatgaagtaagataagtgcttatcaaatgtttatattactacgtaacaagaccaccaggtaataacctaggtaataagtaatttagtcgaagatgtcattgccatgctgatgagtaaattcggtatttaaattaaaaattaacggaaaagtactggaagggaacctttgcttggcggagttcataaatttccaagaatagctgctttgacagctcttctaaaccttccacctctgcctccattagttttatatctgcataagaaaaacattcatgaatttagggagatatcactagaaagtatagaacttagatctcatcttattatgtgtatgcacacataaaatgttaaaaggaaaataagtagtcctatgctacctatgatctggcaacagggggaaaactgtaataactcaacaactttattatcccaacaatagacgagctgaactgatctcaagtcactcgaatacttctttactaaattaaaggtctcatttgtaccgtaaagtttttatgtaagtacccctctttggtaagaaagctactgttctgcaattcttctttttcttcatgttgttggtttaaccactgaactactagtacatcgccacaactaaatagtaaaagtactgtaacctcattctctttctactctagccaacaccaccaaacatgagcaaaccatcctcgtgctttacattcttaagaatcttagttctctgtttcctactacaatattcaacattttcctaacggtggatgatgatttcctgatgacgcgaaaataataaaaaaaaatcagagtagtctgtactttatttttcgttctgctctttacaactggcaagcaagacatagagtaaggagctcatgagaaaccaacatactttcaagtcatctagatttttccagctcacagagacaaggtgacaattcagatggtttatttcacaaaagagagacaaagataatgcacatgtaagatcactcgtagagagataatgttgtgcaggcacaactgcgtctaaaactaaattatataaactgaccttgctccttttggtcatcttgaaccgaccgcacaacagtcccgacaaatcttctaaagaaagatttacccttttgatgctggaagccaaaagcaccagatgattacttcctaagctaatttcagaattagaaaaagcataattacgaaatatctcttatcagtctatggcattcaaactgatgcatggataaggaagtattttgataaaggaaaaaaaagggggtcatttcagagtctgaagagcattttgatacagaagtacagaaataaacagatctgatacgaatcctaacccaatacagaatgttaaagagtataaaaatctaaggtacaatcacgtattgcgtacgctaatatataagacagaatcatacctcttctgatactagacttcgttccacctcaacttgacataaaagaattttcttcttcttagctatgcaagtctccattgattgcatcagttgcctttccagcgattttatttctgattcttcaatctccctatatgtttccagagagaaagagagacaggaaaacgtgcagttagatcacaaatttcccaatccagctgctcttctatcagtgtagatccatttacatcacagaagatgaaaagcttcattcagagttcaactacttcgaatcaaaatcctcaaaaccatttgcaataagaataacgcacaaggtagaagaagaaaatctactagcaattatagagggaagtacctaataaagagcgatatataactgtagggcaaatttacagctccaaaacccgataagacggccatgagggtcacaccaatgaccccgattctgctgaccagctgaggcattgaaaagaaacctttcaagataaaagggtgtttaagtaaagtagtccaacaagtgggtgacaagatcttaagcatttaaaataaaaagaaccaaaagcgtttgtatatacaaaagctactgtcacaagcataaagaagggaggatgattgaccctgcgaatttcttctgacggtattttctacagtcaggcaatcatagtcagtgtcaacatgctcagattctcatttcaatttaaaacaacataccctactccacacatccagaagtacacattgttcataataatgttaataagatctaacttcaacttcaacttccttcttgcttatacagagttgaaaggagaaagagggtgcataaactcaagaggtacctttgtctgaaggcataggaaaatgtattcccatgcgccagaaagcataaaggaacgctgtcaagaataacaaggccccaacagcagcacgctctcttcttacacctgaaatgatggttttaggtaaatataaaaattaacaacagccaaatcaaatttctgtaacatgtggtgctacgatgtttaatcaaaaaaacgaaagaaggaaggattaacgccataaggcaatgaaaaattgcttatacatattcatcagcaaataaatttaatcccaaaatgtaacagaatgtcaattatcaggcctcatactatttctaaaagataaattgataaagcaatagatcgtccatcatataacatacaaaccattttaataattcctaggaagcctgaaaagaaaaggaaagatgaagaacatcgatagcaaggaaaaggcttaccagtgttacgaagcatcaaatagcaatgataataaggtaacatgaaaacaaggagcactatcaaacaaaagagatccaccttccagtttaccatccttgccctgcaaacaaagataaacctcaatagaaagtactaatggtgtcatgataaaaagaaattattggtgtctaaaatcaaaatgatgcaattcccgaagctcaatgactgtattcacaacactttcatattatgtaaaatgacaaattccatctataaaccaaaacttgctactcgaatttgaaagcttactctctagataaaacagggatgatttcgaagagaacaagctgtaaaaggttgcaagagaaggcgaagacgacgctgaaaatgatttgaaccaaagctcgcttctcttcgtactctttgtaaagcctccggttgagaaaccatagaccagccgatcctaagagacacagagatccaatcaccaacattccctcgaagatcccccatccgtaacccatctctctctaataaggaaacaaaactcagatctctttctctctaccccaacactctcatcagagtctcaagcttccgctattcgactgaatttgccgacgaacggtggttcctttgcttttcatcagaatcccaaatttggtttttgtattaaaccacactaaaccgtatctccgtaccaattatttattatttagttttgcgcgactgatttccggttcaaccacccgaatcatgcctcgttcccgccaaataggatttagttcccacttcccattaacaaagctaaaactattaaactcttgccgtttcgcaacggcccagaaagaccaacaaatatataacctaatctgttgcgccatcttccagagtaaaacaccttccctaaagaacaagtacaagaaatggagaagacaacgactacgacgtcgtcgaacatgaagaagaagaagctgtcgtcgacgcaggctatttgctaaagctgcaagttttgtttgtctccgaggacaggtttcaaagaaaattccgtgtgcatggaccaaaatagttgaactaggaaaggctcatgcaaaatagttgatgccctcgttttgcgatggcaaagaagataacgtacgtactcatttgcaattatgtatactcaattttatcaaggccaaaataaaatattgtatgtcaaaatacaaatacagatactccactgatccactcaaagcttgcaaactttgaattgaagactataaataagtggagaaaatgaaataaacaatgaggacgaaactctgaagtaaggaacatatagccaagccaaaacaggaatacacccacttaccctcaaatgctaaaattggatatttaggaaagaagaagaaaaaaaaacaagatttgagactcaattgagcaaagaatagacttcaaaagaaaaacaaaagctgaagacagttttcgcttctgagatattaaatatatcacaagcgacaatcaactcgtggatgcaaacgcagcgagaacgttagcttgagaaggcggtagactacttattattggctgcaactgattcccataaaccgagattagatgggagaaagttctgcctacaattgctttcacttcaactttttcgactggcgactccaatacttgcccaaagattttaaccagctccggaacatgagagaagatctgattttgcatccaagcaaaacaattttatcaaattaaccttagtaatgtttagccaaaggtgaaaatattgccttgagaaaactacctgtggattggatgacgaaacaagggaatatatacaggtgtaaacagccatggactcctcttgatcttcctttagaggtagacctcttaagaacactggaagtacctggattatataacttagggatgagtaccgtgtttcataaggtttcaggaagtaagcaaaaatacatgaaaatggcctagctcctagatcatacttgatttagcgggactagttgaggatgaacaacaatcatccttgcggtagcacctgctgcattatccctaacagcaaggtctggttctgaatccccgaaaagtggggaaattccgcgtagcacatcaccaaaatatctggtattgagtcaaagggagacaagtatcgcatggactgacaattctcatattcttccaaaacagaaggacgatgaatgagcatagaaatcaatggataaaagtctttacgactagagtagagttgaagcatgtaacacgaaaaggatacttaagagcagtttcacccccgtttttgcatagctctccaacacagaaagctgcattccttctattggttgcttctggtgaccccaactctttgagcaccaaaggcattaatctctgcaagagaattacccccaatagttggtttaataaggctcaaacaccaatcatagagaacatcagatgaggaaacgtacatcaacataggaagagattggaagacccatgtcttgagcaacctcagcaagactagcaactaccattgtcctatcctgtggaggacgtgaagctttctacagacacaagaagtgaaacagtaagtgcctaagtttcaatggaagaagatatgtcaatgaatactttattcactaatacccaccgcaaatttcatcaacggctcaaagaattgggcaaagacaggttcaaattgagaacccatacactttgcaaaggcgggaaggaggtcagaaactgcatccatgaggacctcatcatgtccagtatcatcatcatcaatatcactctcatcttctaactgctggcaagctgctttttccgtcagcagtagcaatgtcgcatcaacaaggggtgataaatctagaaccattgtcagcatatgatacatgagtaaggatcatttaaatatcctgaaaataatttacatcaaattgactccaacaagaatagatacccacacttttgaatggctgggtaaccataatccttcatgatatcggcaacactgatgcaagcctgagcaacaacctccttgtcgtcatcatcagtcatagttttgatataattattcataactgtatctgcgatggacaaaaacggtttcaatatcttcccgtcattcttgtgttaatgagaaaaaatgctgtgttatgtgttaccaagaatttcatttgcctttccagttccatcctacaaaagagccaaacattaggaaaaaggaaactaccatggctggaaattagataggattgagattcgatatatgcatgatcaagttcttacattatgagtctggaagatagcatgagctgcagccaatatatctgcaattcaaattagaatgacaagctgtaatgccacaatcattatcaagtctaacccatagattaggtaagcttttaaatactaacatagttcccacccagtataaacaatgacaattaatggaacagaatattgaataatcaatagattgaaaactcacgtttcaaaccagtaactgcttgaagccgaacatcttcatgaaaatatgcagaatgtttgtccataatcttcaatgattcctcgaggtagcttataagttagttaaggaggcataaaaaggtttcttgtaaaaagtccaaagaagaaacaaccgttaaagggaagttgaaggatacggtgcaaaagcagatttagtgtggagtgcaaacaggccaagagcttgagttgcagctgccttttcatctaaaactcctgttctaacgctaatgttcctaactctgggctcatcatcagcatcatcatcagaggataccccaccaaaatcattgacattttcatcatctgactcatcaatgtccactgcagatccatcatcaagattgcacgaagcaaatactaatggcataacacgaggcaaatactgcgggaaaaacgctatgtttactttaaacctaatcactggagtattatgaagtctatttgaaagaaatgtatgcacacctgggcaaaagtgtcatccaatatttctgctacgttgctgaagaatccatgagtatattctcgcaactcactgaactccaattcaaatccctggtattttgtgattgtgagctctttcttcctcaaaatagcatatatagttcaaagatacagaatataaatatatagtaaggcaattactgatattgcagcatcaatgaaaggtggcaaaatggcctccatcccttttctcccaacagacattgcaacaatccctacaagctcagtagacctggcacgggcacgaagatcctcgtctttggtgagcaccatgaaaaacttcatcaactctagaaccctctcagcgtatggattgaatgcttgctctgcagcagcagcaaccgacccaattgcagactgcaagcaagtagcacgacgcttaaatcaatatttcagatacaccagttcaaaagaaactctggcaaagattgtcagtttaccatgcatgtctcttgtagattacgcggactattttctagggctgccataagcttccccattaaatgatcaagcagcggaacaatttcctctcccatgttctcacagaatgctgctaaagcatagtgtgacttttcctgtagacaataataagaaatgttactaataacctaaggtgataatcggcagaaaggtgtattttcaaaaagaagacacaaaccacactcaattggtttctttaaattttaccttcacttcctcagatgtatcttcaattgcaatcaataggcatggaaggacactctgatagtgtgataggatctcgggctgaagatgctcagcgaattggccaattgcaaatgatgcagcccctcgaaccactagctcagggtctcttaaagctcctaagactatattaagaacagtatccagcttctctttcatcagatcaaagcaaccctctgatataacaccaagagctgttacagaagcttcccgaaacttgaggtttgtactttgacaatgcacggaagcaaattcaagaacagggaggaatacatgctttggcaggttcatagctagagtgtcaataacttcagcagatgcacgatcaggagcaagatcatcatcgtcctcttgatcagatgactcagcgagtaaagggcacataacttgcaagattggtatgacaagcttatgttttttaagggaattgtatttatactttgccaaccatgaaactatttggattgcctggtaaatgaatggagtaaggcataagtaatcataacaccacaattcgaacctatttcaagcgaaagagaataattctcctaacctggtgacgggtgctactttccagattttggttacaggaaacttcaagagagaactgcacaattgctttgacagaatctccaagaaggggagcaggagattcaatcagctcatcaaaaatttcaaaagcaagtatagcaacatcctcctctccagatgcaatacatttccttgatacatccaatatactgggaatgaaatctcggaacttcacctgacagaaatgacataagcatatattccaaatcagtctttaaattaaacatgtatataacattaacaagaaagtgagaaagtggctaaatttaccacttcatctccgtcgttggtgaattccagaaaagaaccaaccgccctgataaattacagaagcttgtaaaagagtagagataaaggtccaagaaaggagcaacagttatcaattccagagaaaaacaaattacttgagagcagcaactctgacacgactactgctttcatcctgcatacacttgagaagaagagcctgcaagtctgcaaagtatggcctaaatgtgttcccaatcgtttctgtcaaagagctgaaaaggatcaatgctacctacaaatacaaacaacaaaataagatttttaaacaaaagaaccataaatagacaaaatgagacagagaatttcaaagggaagttacttcacgatgatcttcttgagcactctgactacactggaagagaaaggttaataaatcaggccactctccagctggaacagcgtacttggctactacactcacaacattagcactcgcacgtctcaccggtggactgtaacaactccaataagaaatcaaaaactcaaatcccaattgaaaaaatagaagagcaaaagagagagagagaaacagacctattctccacagtgatgctctcgattaaggattgcttaacatgctgtttaagctgaggagaaagcttagcccaatgtccggtaatccttttgcggaggagaacggcggcgagctggcggacgttgggggttttagcggtgcggagatgctgaacgagagcgggaacaacttgaggatctttggcaagacgtttgatctgatcctctgcttgacgccgagcatcgttgtctggcatgaggaattggatcaacagaagttcgagagattgcgccatagtttgtttgttgattgatctctcttccttcctcaagcagagacagaggctgctctagttgtagcagcaactagcaagacagcgaatagggtttttcttattttttgttcttttatttaatttgcgagggtttttgtttaattcacttttcgattggtcggtatcttattatttttggtggtaaaactttattatggagttttgacttttgacttaagttgtttgactttactccaaattcttacaacagcaaattttgtaagcaattacggaaatttctttcacttaagtatggaactgaaaattctaacagaataattttatgtagaaaaattgcttaacaacaaaacagcaacgaatggttatcttataatttgtaatgagttacaaatctctttttatgacactgagtacaaataaactataaattatgagagatgtgtatgatttgttgtattgttttctataagccgaagatttttttacatctcaatgtcttcgagttctggtaaagggaacctgagaagagctgctattccagtcagctgtgccaattctgcaaagttcatcaacacttatttagcacattaaaaaacataatcacatcacaaattcactaagataagaaagaagcaacactaacgttctcctgacacatgcatcgccgaaaatataaaagcatctcctcccgaatcttttaccgactccaccaaattcacatacttcttccttgttttcacgtcagaattcctggaccaaatttatatatttgtaatgtcagtctcaatcacgtttgcctcttaaaactaccaaaaaaaaaaacgcattgaaatgggatattcccttccgttactaaacctgaaaagctcgtccgttatgagaagcgtttgaattgccattcgttcatttgcaacttccacgtgttttggtccatagcatgcccgatctggttcctggattaaaaatcaaaaagatatcaacacatattgagagattcttaaaatttgatgagaatattaagaatcgctgagagctttgacctacagttgaaagcatgttgtgaaaatcattgagagctttgacctacataggcaaattcacatcagttaggtagatgacaaaggtacatttcaagagcacaactcagatgatagagatcaaaagccacaaaacagtgaggacttatttgagttcgtgtgaattgtgactttcaagctaacccagtttcgaatgagcaattcaaaaatataggcaacattctaaatcacctcttttgctgcttttgtatcttttatcatattcatcacgttgggggcatggagaacctcacccaggctatgtctgtgcaccaaaatattatgtcagaaatcgaagaaaatttgcatgagcagagaatctcaggctgtttagtttagaagtgaataagcaaaaaaaaatacaaacaaagtagagtgaaccgttaacactgatagccaccatgaacatgaatcataacattactaaagtaggtaacctggtcaattcggacattgttatacaaaaattaaaaaaaaagtgtatgtttcctgctaaagaaattattaggtttatccagcagatatcaactcagatcgacagtataaatctcaaatcagtgttccacaactttaataaataaattgcatgttatatcatttgactctgagcactcaatgtattttagcatggcagaacaaaattttgacaggcttcatgaacaatttcacagaaatactacctatatccagagtttgtgtgcaccaatattatacgtgatttattctcaataataggtctcagttgtcttctttctgcttccaacaataagtggcgatgaaactgatcctggagacatgaaacaatcaaacggtctgtgtcatatatgtatgggaaatttgtaagcctggtccagctgcaatttgaaaaataataaaccacgtaaatttagaaagtctttgagtgaccaaaaaaaaaacctttgtgaagccgggacttgcaactactgcacagcgaacgacactgaagtcaacatgtttcacaaaggcctgtgatattgcaatagacttttagatatgtgaaactctttccgcttttttgtggtatgttttagaaaacaacaaaaagaaaacatcaacattctgagaaaagacaaacctgcagaacattctcaaaaaatttcttcaaagcctacagagaagcaaaaaatgacataaattgaaaggataaatatgtaaacgaattttgggcacatatatgacgaaacagtgaaggaacatacagactcgtaaccagcaattgcaggtccatgcttcctaggaatggatgtttctattcgtgcacggctacttgtcacactgccaaacaagacaataaagtaaacaagaacagaattggatgaatttctttgacccgtttcatacttgttcagccaaaaccacccaggtgaaataagagaactacatgttgtcaaaacaaaaactaggaaataacaaatttcacagacaatggaccttgtcactgcaatcagtaccttctgcccacaaggaagatttgtgccagtccttcttgcattagaactacagctagatcagcactagcagcgggatctgtgcataagacaagtgcaataaatttgaacccggaagaaaaaatggaagataacatgagatcaaaagcacatgacaatatgacatactgaaacattagctatttaaaatgaaaaagccttaacgggtcacaaatcatgtttgtgcatgattggctggagggtttatcaaaggcgtgttaaggcttgttgatggatacacaagggtcttagagacttgaaaatcttataaaaaaaatgcattttcgtctcaacagccacgtataaataggaactaaactaaactgacatgcaggcctaagagataaactggagacagaagaggagttctggaatattgcatgtaaaaaattttgttaactaatgccttggatttgatatctacactagatgacacggagacagatcttggatattgtgtcaaccaatcaacacagacaccttcccagttatgtgacaattaaaaggaggaataaatggagcagcatacctgaggcctgtttgagtgtatcaagagccattgagtcccacatttcctgcaaattagccatgtacacactaacgattacaaatgaagttttaacataagtagggggtttcaaagttcaaacttataaccaacacagtaagcagactgctgcaagaaaaacatcaagacctgtgtattgtaaaacagcttttacctagtttttaaaactctaacaatgggatcgtgcactttaataaccatatttaaaggtaatgacatttctaagcattacaaaatacattaatggttatcgaatattaaatccatgtttaaaacattaacattaagtggcgctgaatttacagatagtagcttgcaaatggtatccacactacaccagcgtgaattgcattactcatataatagaatctagattgcaagacacatcctgtcacacttacaaaggagaaatagaacagaacttccggaggataaaaaatagtaaaaagaggatatctacctttctcaacacaaaaggtcgtttcagctcaagttccaaagtatggaatgcaccaatctgcgatacaacacatcagcacaggaaaatctatagaataaaaggcggcctcgcatctacctttacgtgctcattctccaggatatttttgccacgtatgcgcaaaacagatccgtctttgtcatagtccacctcctaattgaacaaataaagagaactgaagacaatcagattcattccatgaaattagactaagatatcttccaatgtcaagagtagcaagattaaagggcaaaagaaaaccataaaaagaaacatatgtaagaaatatcgatttttattacgcaaatgactgtaaagcaatatagtgcatttatggtcattgttaataggtttctacaatgcaaaggtataaacaaattggcataccaagcccttagaatcatacctcaacttgtacttccagcttcagtttaacacgttcagagtctcttcccccaccaggtatctctctctgaacttttctgatagcaggcatgatactaaattggttaacctttactccttaaaaattttcatgaaactattacaaatcagtgaacttttaatgtgatacatgattttaatgagagaaaaaaacaaagcatgtttgcctaacccttcaatggaagtggctcaagaagttgacaaggaaaacaccatgtaagaaacaaaggcagtgaaaaccgaaaggagacagtacctgaaagtgacagccattacactatcgcccacagcaatcaagttataagcataccagagatcatcagagtcctctgccaccatctaccctcaatttaagttgccaacacccacaggacaaaaatcaaatttcagctaagcatttgaattgcacacgaggaaaaaggaatcaatcaaaccttaacgcttccgggtccattacgaacaaaatccctgcgaacgatcttcatctctcaaggtatgtccactaacagagtccagagacacacaaggacagagattaacactagtctcgaacaaaggttcaatctttcagttctcatgttacagcaatttaatcaaaagagagaccaatgcactggaattggtaaaatcggcgaaacaacacggtgaagtaagatacataaattacaaacctgttggaagagttacagatacagggcttcagctcagactccggctccggctcggcgatagcgagaacttgtatccgtcgtctatcgattgaatcaaaagcaaaagggtcagtggtcgtaagctgctgcagagattcaatccgtagacacgcagtttcgacttcgaagattcgttccacagcttctcaattttaattaccagatgtcaaaagtcaaaataataaaaagctattatatttatagtaaaaaaaaaggtaaaataaattcagtagaaaaaaatagaaataggaattgcccaagttttaatctcttgagaaaaatagaaatagaaaatcataaatatttggaaaagtgtgtcaaaaattagttgagcatttttgaaaaaataatatcatataaccaccttattatcaaacaaaacgatactatccgacagaaaaattaaaccttaaatctctattattgatttttttaggcagaaaaattgtctagattttatttatatgcgagttcaaaatggggttttctaaataaaatttttaaaaaaaaaaacttctcaatgtttaagataaaataaaaataaaacaaattatcggctacaatatctaaagtctatgaaactttatttatatgattaagtatgacatgtcgtatttctctcatttagctttgggattaagatacagctgcacataataaacatcctacaagttttaaaaccgtctaatcagagatatttctgatgcatataatattgtctattgtaaaatcatctttcaaactataaaataagagtattccactagttatgtgtcatcaaagattaggtcagacctatgataattatcaattatttaattcagattgttataatcgactacaactcatatcaacttataaattgcctaacttatatgattcaatatattattcattaaattaatgttatgtgactgtataacatcagccaagttgtgaacacaaaaagcttgataattgatataatcctcaacaattttataaccgataccttttttattttcttcacaccaaacggtagccttttttataatatctcttcgtcggagaataataagacaagatatttgatattctcatacagaaatatataaatctagttcctatatatactttaattaataacagctataaaatctatatcataaatcacagtgcaatgatatgtcagatcatttgtgattagagctccaatcatatactagtaaattcttaaatccatctccttgttatcgattttgtgtgtttcccaacaaatatgttaagtgcaaatattaaaacctccaaccaaacaaaatatatcacaatctatgaataatattgacaactactaaatagatcgtaagttttagtttatgcaagactatacatacagtagttttgtaaagttacttatattggcaaacaaaatataattctggtattcagtttgaaaacatacgttaatttacacaatatagttttgtaacaacagatttaaactccatattttgtaaacaattgtaggctatagattaaaatatagaaaactcatacacgactactcatactggacccagtcatattgtaaggtaaactgcgtattaaacgtcgtgtaatcagtcaattatgattcaccatgaacagcaatacagcataatattatagtagtaaaatactttaaaatccttttttttcgtttgacaaagcgctatactaaaaaatatagcaaactcaagtatacactaaaataaaattagtacatttgctagtcttcacctctagaagacaagagtatgtcgttttcttgacaaagacgatttggttttggtgagttattatagtaaataaatataatactaataaaaatgtatttattataatctatagattagagagacagctaaacgctaatgtgtagtttatgcgcgtacgacgcggttaattttgttttctcttttttttttaaagtaaacaaagatattaaaataaaataaaacacgagaccgtgtcactaactaacagagacgtagctacacatatataaagagatcgagaggtcttcatttctcacaagccacaacaacaccaatcacacttctcaaaaaagatcagagatttctagatccttcttcttctcctgcaaattcatctacctgaatcttccaactttataaatcgatcatgatctccgtcgtaatcatcgctgagttactagtagagtacacgacggctctcgcgaaactaaccgccgggattcttccatcgagacggcgaggcgatagtaacgttgtacggattggtggtttctctctgccttgtccttctccgtcgagtagtagtactagtcgatcatctgcgattccagatttctcttctcatctcgttgatttctgatcttgtggaagacgaaacagattttgttttcttctctctcttttttttaaatctattcgaagattggattggacggctgagatttttccatgtgtgtctcttctgtctccctctcttcctctagattttaaaatcgcttattagatctttgtaaatcggtatctcaatataataatagtggttatgaatttttgatgaactactctctcatcttctccttgcatttctcaatttctgattttacctaactgtgatgatggctcatttgacgatttttggtctcgttttggtgacgtcagaaaaatggatataagtcgcatttgactaattaagtgcactagtttatctttttttcactctgaatgttcaacatataagaattcgtttccatgttttggtccttatggacggttgaaaacagttacgagaattcgaaattaaataaaataaaaataacaatcataggtagcaaactaaatgataagaccagttaatgatgaaaattcaataattaagttaatttgttttttgattaaaagaaacaaaaagcatcgtttaagaaaataacaagaaaacaaatcatacgtgattttacaaatttatgttcttgtcccgtctcattaccaaacgggaaattaaatcttggtctagatggaaatgcgtttcataataaaacaagaatttgaaatcggtaatgaaacaagatgggacgaaaactgagataggatatggaatggaaatctggtccacacatttatcggaaggtggactttagctttcaggaattaaagaagttggatagattttccgtgagtacaccaaatttgtagtattaacagaagttgaaattacggtgtgaactctagtagctacaactcccaagtctttaactacatttgatatataatgttttggaacattcgttctctactactgatcaccacgtttacatcacttttctttacttggtctaggtaatttaatttagtactcaaaggtatatatatgttgtactgtcttcgtctatagagactaccacgtccattcttattttgttggacggtccatttttaaggatcaagaagataactaaaattttgactttttaaatgaaagcggagaaaaccaacacatttttatgcttaattaggtcttttgctaaacttcacaagagaatcgagttatgagactacgtacgatgatgtgataaaatctctcagaataaagttttcatgacaatgacgtatctcctaacttataatattagtaaacaaaatccatttgattatcagaagattagaggacacagctaatgctatgctaatgtgaactgcgcgtaagacgcgcttaatcatttgtcaatgtgtaaagcgaaaaatattaaaaatatgaaacacgagtccgagtaaagtgacgatagtaacgacgtaagacgagaaactctggtctacacctttataaagagataagaaatctctctctccctcacaagttataccaacaaaattccatcatcttttgtctgaactcaagagacatcttctagatcattattctccggcaaatcttccgaaaaagtcgatcatgatttccatcgtaatcattactgagctactagtagagtacacgacggctctggctaaacttaccgccgggattcttccgagacggcaaggcgatggagacgtcgttagaattggtggtttctctttatattgtcctcctagatcatcaccgattccggatttttcttctcatctcgtcgatttctgatataagacgattgtggattgtttttttctttctttttttcactacttttttgatcgagttttgtttcttacacactttctttaaaattaatttgaagagtgacagctgaagatttttttctccccttttggagatattaaataatttaaagatttgtaaaccttatcaaattatataatagaaatttatgattttgatatctttatttctctgattttcttaatttctgatgattgatcatctattccatcgatcttgtccacaactagtgatgattccgaaaacttgctatgaggatgacgatcatcacagtcgggctcctatcagtaattttgcataatcgaaaagagagaaaaacggatcgttaagcaaaacatagtagtaagaaaatacttgaacaaacgtgaagttttgtgctattccaccgcaaactttttgaaaccataaacctatactcgcagcatatgagtgaatcagtgaactatactcttgtctgatatattgatgcattatttcaaaaaagtcaaaagattcgttgactgattttataagtcaccataaagataatatttgcatttatgtcatatttctaggatcaatgcattatcgaaaacaaatgaaaagatctgtgactgatttctacgttaccatttgaataatctttcgatttatgtcatatccctatgatcaatgagttttcataagaatattatttgtacataagaaaaagtgagtttttttttgtgaatttaagaagaagtgagtttacttaagaatattttttgaactaaatttaggaaaataatatattgtaactggtgaaaatatctctgtgttaaaatgctctaaaataagtcagagcagatacggtgttagtattctacatgttttttttaattggagtatggtacgaagcactgacttcgtaagtaacagctcacttttgtcttcttgccaacactctgactattatccacaacgcgtgacacgtggctgttagttcataaagccacaaattaaagaaaccaaatacgtgtacgagtaacttctggaccactggagcttaaagttatggtctatataaaccctcgagtggtctggcttcagattttcaaccaccattcaattttctataaagagataacaaacttcagaaacttctagggccatttttattccggtgcatcctaatcatgatatctgttgtaatcatcactgagttacttttggagtacacgacggctcttgctaaactcaccgccggggttcttccgagacggcaaggcgacagaaatgttatacgtattggcggtttctctctgccttgtcctcctagatcctcacctgttccagatttttcttctcatcttgtcgatttctgaactctgcgctacgccttaatctcaattttggtttttcaccggagattatgactgccaagacttttttcccggcgtctgatctctccgtctgtagaataccttttttgtattttcttaaattttttgttttgttcctgaattttgaatggctcagagttgtaaaagatgtatcgaattataatagagactatgatttaactcttcatcttcctgccctgtgttattagaagctgataattaatcatgttttaacataaagataaacgcatttgtctgtttaggtttgttaactgcctcttaactcattattaggctactgattgtatttcgattcgttgtgtttgagagtaacaaatgagtgtactaacttgttttttaaaaaattatcgtttggagattgccattaattgtaagtagaattagtaaaatgaataaagcggaatcgaactattagaattttgtaattaactgaagagaataaagttatatacaaagataggaatgtgtgtgtatgtgtttttctggccccatgaccataaataagtaaagtaacctcttacaagggtatgcttggactcggagagagcgcactaccgtagagactagaggcccttctagaaaagaaaataaaatttaaacaaaagaaacaatatattgtgtaatatgtcaggtttaattgtattgtgtggaggaaacaaacaaaaaaaaaaattgtattgtgtggaggattttcactttttagagttgaaaaatatattcatatttgtttttttaaatctagtatgaacaaatgaaatactatatagctaatgttaggtgcgaaaatttgatgaaaaaaacctacacttttttatttaatctttttttacacttataatcatcagttgtaagttgtaaccatcccagtccacacaaaagagttagggggagaaaattcatgcaaatcgaaccggtattaaagtcaggcttttcgtcttactatgtttatatctgtgggccattacatcttcttcagcctttaaggcgatttactagtatcttaattcaattgctcttcaaacagttgatatgaggtagggcatgaccagccaattcgatttttctaataattgagcattattagctacaagggggatgacctgatttattacttttttatttaattgatcaaatgtgtcaacgttgtagttatattgatatatacatgtagagagtgagagagatatttgagaaaatggaagtttaggtagtccaaagcaaagtgtatggattttgtgagacaaaaacacaaacatcaaactactcggagacgtgtctctatttaggacttgaataacttatggctgtggtgtatttcctcctcccttttttgatcttttttcttctttctaattttgcaattatggaaccaagacaaatgaattgatcatttacatttccaagctatcttccttcctatctttatcttcgagaatgggtatagtttgttgcaattaaccatagttatttatatactcatttgtttcatgttgcaattagtctatgttatgttcttcagacccgatcattttaaacatttgtaagtgtatgcaattccatttttatactatgaaagccgtgcacccgatttctatccatgtggctactttctgaattctgatatataaatgcagtttggtttccttcttttttgtatgttacacttaaaaagcaatttaggttttgcatgtatacatgttttttttgttgcctacaaaagatgtgaagttgtgtgcacttaagggaaaaaaatatgaaaaggacaaattgaacaaacagcattcgcttaataatcaacactaattttctgtgaaaacaacttgcatccacaaaaagaattaaaatctaaaaaagaaaaaaaaaactgaaaattttgggaaaacagaaatattaggatataaaattagtcactaccctaaacctaaagaatagactgaacagaaataaaatttcattttctctaccctgtcattttcctattaaattaacggtgcctagaaacaaaaaagaagaaggaaaaatagtaattgactaactaacaataatattcaatactagtatttactatcaaggataactgagacacacatacaatatataattatatactaatacatagtataaatcttttaaaattagcaatagtatttgtttaggtttaaaggttaattaatgaattaatttagatgtcatggattaaggtcccgtttaagatattcagtattttagttttaagccttaattgtaatttagagttagaattaaattaaaaaaaaaaaaaagagttagaatctaagattcaacaacgtggtgaagtatgaacagtatgagaaaggcaccattcacacgcgatttggccgccattatgagctaaaacgcgttatgatgtcagccgtttatgtgtggactatggactcgcatatatcattcggctaccatttaattacattataattaagtgttgattaatattatcattcatgaccatttatttccaatagcacacaactatcggggtatttttgaattgaattatcgtctctcttatctcatcagttcactacaacttgttacagctattattgccactgtattaattcgtttggaccaattgtgacatctctaattgtctagtaaagaaacatgtcaacttccatcagtattttattgttagagattgatttatactagttgactagttgtaattgactgataatagttggtatcggatagtatctcgttataattttcttagcttccagcatttcgaattttagaatattgaaattcaaccatttatgatgattcaataatatttttcatatgttttttgatctttaaattgtaagttacagtcaagggttagaaatcagcatgttagtttttttcttttttgttctattctgtcatctgtatatataataaatatttatggacaaacagtatttaaaacaagatccagtgtttggtgtcctaaaaagaacaacatccttttcaattagttcatttttgacttgttggagattctagaaccaagagacagttgagataatcgtgtaaaggtcaaatttagctctttacatatagatagtattattattattttttgctaaaaaaaacatatagtaatatattttaaataacaaacacaaaaacagtagagaattagagatattcgtaccgtccaagtccacgcggacaaaaattgtgacacgaggccacacacacacacaagaatctctagtccacacccacatgaccggccacatcgcctataatccctatccatcctataactactacttaccttcttcaatatccattacccaaaaaaaatcacccatccgaatattcagcgatccctgaatactttttccacaagaactttttgatactctacattattcctctgattagtttttctaaacaatgtttgcaatagtgatatttgctgagctacttggccagtacacggctgctctcgccaaaattgtctccggaatccttccccggcgtccccatgatcggagtgttatttacattggtggtttctccttacctcgtccttcttcttctccggttccggacttctcttcttatctcgttgacttttaagttctagttcgttagattctatctcactttgtaaatcttggtttgtcaaactgttttttttttttccacaacttgtaatctccaatctagtgatggtcaatagtctttgactaacagtcatacgaagagtgaaatctaaaatcatttatatatgaaactcaataaccgattttacaaaaaaaaaaagtttcttcagtaaacgaaatattcagctgaagatgagggaaatagagcacaacattactcttattcatcaatctcaacaccacatgagagaagtcttcacttcttggtggttacacgaaggccagcagcaggaaggtcccggtacaacttgcgtataggcttccatttactgttctctaatgcctcacagtgcggtgtagcaaaactagccgtccaatatgcacaaggcgcaaccacatcgcagacataacagtaacactacacagtaaacattaaaacaatcataagactctgttgttacattacaccaaatctcaaacccaaacaactaaaaaaaggaccaagttttttcaacatccaaatagattattacctgattacaatgtgatgagtgttgacttgattcaaaggggaatttcaagcagagatgccttggatgtggaaaatccctacaagccacctaaatattcgaaaacagagacataaaccctaaatcactaattgtgctaaaaagatgtgaaaagcctcaaaattttcagacaaaacagaggacccaagaatcctaataaccaaacctggcctttctcatggacaatcgccacgtcgtcgtcacattcagatgcagggctatcggagagctttcgtgcatcaaatgaatcgttgggatcgaaatcgaggataaagcaatcctctttctcttcgaaaatcttcatatcttgtcgtgttttgagacaaaatatacctctgagaggtgttccctcttcttcttcttcctcctccttactaagtctctttcttcgcttgcttttcgttttcttctttgtctcacatggatctggtgtgatccccactacaactcttcgctttctcaccatttttttccttcctacgactgtaaagtttcgatctttttgttgcttttattgaaagagttgttcgaaattcgcaaatgaccgttgttgttcctacacaagcaccccaagcagcggtggcagaggatttgatctcatttttgaattagaaatatttgattttatttttgaataaatcgtgattagagaggagagtgttttagggtttacaattagttaaggccttttcaagacctttatatcaatatgggtaataatgctaaatcccaatttattggcccaaataatgagacatgactcagcccagtaaagtatgcaaaatacatttaggtattgaacatatcggggggagatatgtttgtgaatgtccccaaagcatatcttatgaacgattccaaaatcatgtttggacattcattcacccgaataagttaatttagcaacacttttaaatctagactattacatcatttggagttttcgtagaaacttcaaattacgtgtcttaatattcctgtctcttactctacgtcacattcatgtctatggcggggctttgaatagttgttcgactaactatgagttttggttttaaggctttgtgtgaagacgtatttcttcattggattcaacatgtgtcaaggactgtttctatgttcttttgactattaccttctaatttaattataaaataatggaaccgaatttttgatttaagatttttctctgattggttgttactcctatcagatcacgtttacttggaaaacaaaacagatttttctcgattggtgtattttaagaaaatactcacagattatttagtgtcgtctcctcagcaattacatatccaaatattagtgccattatttcatttcttttgtggaaaagacttctctaaaatctctctttgttgtttttacttgcatcacacactttaagctataaagagaaacatatgcttatgtacaacaaacagtacctccaagaaacattaaacaagaggataatgttgatcgagtcctactgaatctggacatcgatgactttgcgttcgactttggtcttagggatagtgataaagaggactccgttcttgagctcagctttgatcttgtctttctcacagttgtctgggagctgaagtcgtgttccatatgagctaacgcttcttccagaccaagaatcatcactgtcttccttcttctgctctcctttgatcacaagtacgttatcttctacagagattttgacgtcttctttagagagaccaggcatgtcgaaacgcatcttgatctcgtgttcttcctctttgatgtcccacggtgcacgaatctctgacactccacttcctcctctgtttcttcctgagacaggcatagtgtcctcgaacatcctgtccatagtatctaacatttgtcgcatcgtcctcattggtgacaaaggatccaacaatcctgtggttagattaaaacagaacattgtttcagttcaaagcagaggaagagattttcgattgacaaaagctgagttcataaaaacagagcaatgttttaagtaataagcagaggatgtagtttttatttatacaagtgaagtccgtttagttagttgaacgtaccgaaaggagagacgtccatggttaagcgttgttgaggtcttttttcgacacttgatccttggttccctttttgttgtccttgctgaacaacatcaatggagttttctctctggtcttgagccctgatccggctagggatcttccgtgggaacgaaaccgagaacggtgtagcggacttcgatgagacagaaggagatggagcaagaggtgaacatagagccgatgcagcaaatgagagtgtagaagccatttgtttcgagtatgagccaaaaatatcgctgagtgaagattagaaaattctagttctgagtttgttgagtatctactacaattgtagaagtgagtgtatatatgtaggtgaggatgagaaggctctaagtgacaaaaggagaggtcttgaaggttgaagatttgatacgaagtttctcgactcgttttgttttctatctatctattttactatttgttaacctttgtgcgttttctcgtgttttctcatcttctcccgaaccatcttctttttttccttcttgccaatcagtgtttatttgtgatgaactaataaaaacaaaataaacgaaaaaaaaagactagatttctacaattagaaaaaccacgattacgaaaaaaccatgattagatgatatattgtttaaaaaaaataaaaaaatcgaagaaagcatatcatattgaaaaagagagagaaaaaaagcaactcaccaagtcaccattatgtgtgctaacttgcagaaacatatgagaaatggaatgcccaagtaaactaaaaatatatatctacgggagaaattagaaaattttgtctagtttgatcatatcagctacacgtatgtcatatacagtatcaaacaggcttattagcttacgtataaactatctatagcatgttgaattgttcaagtcgttttttttttttttttctttatcacagaattgttcaagtcgttttatataataattgttgtacataaattatacaaatagcatgacatgactctatattaattttgattggtataaaattatacaaaatttaagctctaatctattaatccgcaatccgatcaaatgttcaatgatccaaaagactttatgttttgtgtatagatttggttttagaaacattgaatgatttttctctatattttcaaaaggctgctagaataagatcagatgatgtaatagactaaaaaagaaaaaacaagacacacattgaactgatataagatgatgatgatgcaatagtacctacaaaatctagtggacgccgaacagtactttaattcggttttagaacattctgaattgaaggcctattaaaggcccttcttgacacaatctagttacacgacttacgacggtgcagctaaggctatttcggtaatttcagcttctcctttcctcgatctccaagtattcgagaaacccccaccaaggcaaaagctctgtcgtcgtccacaagaacaaccaaatttgtttccgtcttctgctaacatatcctctttttcatctgggaaccctaatttcttgactaacttagggttttatttatccatttgagatactctgtaattgaaaggttgaatttttagaagagacatgggaggttcgtcggagacaaagatcttacaagaactcatactttacgcggcgagcgctgctttcagctgcttggttctctttgcgggtcttcgtcatctcgatcctaatcgtgaggcttctaaaaaagctctcgagcataagaaggaaatctctaaacgtttgggtcgtcctcttgttcagaccaatccatacgaggtaatctactatgaattaagcatcttagaatcctcactggttggtagctacctgagaatgcgatatgtggtttcgataaccaatttgtattggtctctctgtttaatattgaaatttggatacttttgagttccaatcgtctttttgcgcaaactcatgaaatgagctcgagaaattgctcactagtttctaattttgtgaataggatgtaattgcatgtgatgtgataaatccagaccacattgatgtggagtttggttctattggagggttggagaccatcaagcaggctttgtatgagcttgtgattttaccactgaaaagacctgagctttttgcttacgggaagcttcttggacctcaaaaaggtgtcttgctctatggacctcctggtactggaaagactatgcttgctaaggctattgccaaagagtcaggagctgttttcattaatgttagggtttcaaacctgatgagcaagtggtttggagatgctcagaagcttggtaagtgcatattattattttgtgtgtgataaaggaacacactttgagtaggcctgtcttcatgctcgtcgtgttttcttcctgtgcttttatcagcttcacattgtgcaactttgttggcagttttttgttttttgtgtgtggttattatatcaattacactttttttggtctgttgatggtgtttctaatctatgagctgctctgttctgtttcgttctctcagtttctgctgtgtttagcttggcctacaaactccaacctgctatcatttttattgatgaggttgagagctttcttggtcagcgccgttcaacagatcatgaagctatggccaacatgaagactgagtttatggctttatgggatggattctctactgatcgtaagttgaattcttcactgttcggcttactttgccatgcagactagtgtaacctggagtatgtgggtttcttatgaatagaaatggttgcttttgtagcgcatgcaagggttatggttcttgctgcaactaacagaccgtcagagcttgatgaagcaatattaaggcgtcttcctcaggcctttgagattggaatacctgatcgccgggagagagctgagatattgaaagtgactctgaaaggagagagggtggaacctgatattgactttgatcacatagctcgcttatgcgaaggctataccggatcagacatttttgagctatgcaagaaagcagcttacttccctatcagagaaatcctagatgcagagagaaaggggaaaccatgtttggtaagtttaaaaagaaaacatggtccactgaaatgttcagtgttgcatccactagtttcaaggtactgatgttatgagtttgtcacgtttgcaggaccctaggccattatcacagttagatttggagaaggttcttgcaacgtcaaagaagacacaagttgcagcaggcgagtactcattgagctcgcagtcctcggcttggagaggctcaagggaaccagatgaggtccaggcagcgataagtgggatctcgaagcttctagtttctcagatcattaacctacagtcagaatctcaggattcatggcagcgggatcccgaagaagattcccgatgaaattccggatcacttttataaacgttctggtgttttcattggaagtttagaatttgtcacacacttcagtttattctgtaaaacttttcttttctttttggtaggatcatttgataacttatgactgtactaaaaagtctctcaagtttctacattactgaatctctcttgttcataatatggccactgttctcactcatgggttacttaagtgttaactctttcttcactttacttaatcgttaatggaaccttgatcaatgtgtgaagtgattattctgaatgtataagtttcatacatcaatataaaaatctcaactttgagattgttattagcgcacattgtgcaatggtcaatggtgtcatctgggctttgctttgctttgttttttttttgactgggcttgtatagctgattagagagattaaagctttgttttttttttgactgggcttgtatagctgattagagagatttaaagttcctcccttttctatttcccaatttcgtttgttacttttcttgccttttccgtcgatcttcttctccaacacaacaacaatcagatttgcttgattcaattacgctcttaacatcagcttggaaggtaactactggtctcgcaattgtgttgtagttctgggtctcagtttttctcactggctcgctcgtactcttgatttctatcgaaccgagtcctgttcttattcactgaagcattacgtctgattcagaaatttattagctttggatttggttatttgtttcatgaattgggaactagggtttgcttctattttcgcatttctcctagctgttacagctctagcttttgaccgtatgcattcagtgtaatgaaatcgaaaaagctgctgattttgttcctttgttgaatggaacaggttatttgtgattgagatctagtcttcttataatggtaaagtgatcttcttactatggatttgcctttctttgctttgtgcttccattgtaaatgcttatagctttttgagttcaatctcacagaattatcttcttggagccttcaagcccgcctgcaacatctccatcactttttctgatggcaaaaatcgtaaacaggtatctctcttttgtgccaaatgccaatgattacaatcgctgctaccaaatttattggcctagatcattacttgtgatcaagtcacgttttggattttcatttcttctatttaatcgccattgtttcgataggttcccatgaagaaagaaaatggtcagacggctctggtgcctctgttccatagtcaagacactatttccgggaaggtacttggttttttgcttttgatggatgtcagctgttccagttatgatcttgtgatggtttaaagtattttttccttaatgtctttattaggtttgcattgaaccatatcaagggaaaaaggtggagcataatggtgtaaaagttgagcttcttggtcaaataggtgtgcaattgccatgatctgtagatctgccaccaaaagagtctttaatgattagttctgcggtttctaacttatatcgatgtatgcttattcattgcatctgtgtgttctcgacagaaatgtactttgacagaggaaacttctatgatttcacttccttgggtaagtaaaaacttagctttcatttccttttaaacaatgtcgagggaaaagctttggagtttttcgttatcaggggtgactctgataattgattaacaattcattgtgacaaggatttactttcatgtttagtcctgttatattgtttgattgagccaattatagttatgattcttttttgctccttactacagttcgtgaactggatgtacctggagaaatatacgaaaggaagacatacccttttgaatttcctactgtggagatgccatacgagacatacaatggtgtgaatgtgcggctaaggtatatcatatgtttattttttctcgtaatgttggtacacttgtaatcccctatactgtttttaatacaatttactttgttctttacttcctcagatatgtcctcaaagtaaccgtcactcgtggctacgctggaagcatcttggaataccaggagcttgtggtatgtttcttactttttactgctgtccttgttacaaaatagttaattgtgttatgactgtaaattttccatatagcatcaccagaaatattttaatcgtgacattgttgatgtcatttgaaataggtacggaactacgctccacttcctgatattaataacagcatcaaggtgagttctaatagtgataggatctaagtttgaaactatataagaaaaagagataggaactaaaagacctaaaactcaagcaatttataggctcttgctagattcactgatgagtaatgatattgagtgctctttctcttgaagcttgcattcaaatgttgagttcctttttccctacttactttaagagatgtcaataggcttccttatttactactcagagcgttcttaagctcatacaagattaaggcttaaatcagtaggatcatttgaggcacaatgttgaatcttactttttgtacagatggaagttggaattgaggattgcctgcacatcgagtttgagtacaataaaagcaagtaagacaaaatccgtttcatgatttaaggatttgactgattgattgggaaataagacagatatactctatgcctctggttgcaggtatcacctaaaagatgtcatccttgggaaaatatattttcttcttgtgagaatcaagatgaagaatatggatcttgagatcagacggcgggaatcaacaggtgcaggtgctaatactcatgtcgagacagaaactcttgcaaaatttgagttgatggatggaactccagttagaggtatatttggaatctgatgttttagtgatttctttaagatattagataactgagtgaagatttgcattacaggtgaatcgatacctgtaagactgtttctggccccatatgatcttacaccaacgcatcgcaacatcaacaacaaattcagcgtcaagtattatctgaatcttgtactggtagatgaagaggatcgccgatacttcaagcagcaagaaatcacgttgtataggttgaaggaagacgcatcatcttgatgataataactactgtaaggattctcattatccttttgagactttttttgtaaaaagctttagactttgtgtactcagattgttatttgggtcggtacttagaatgaagttttaacagtacttgtttagtttgttcatcaatcaagttccttttctctggattccggtcgagtttgctggatttcatggtaaagtctgaagttttacaaacctcaaaacactctctgaaaagccaaatctctaaatgcaactaactgaaatggacagatatacaaaactggacaactctagagtaaagaagttggttagtcttcttcaattgtttcaacaggaagaccttccttgccccatgtgtagattccaccttctaggtgaaatacgttcttatagccgttaaggaccagaagataagcagctatgagagacctgcaagaaccctaattatatgagcaccgaaacaaatgctttcttcgcacaaagttgtagacttttggcattacctcgattgttggccttcgggaagattttgtgtcggcttcattgtacccgcggatgaacaagctactatgatctttgcctctttgtcaagtttagcttctacacctgcaacatttccgaaacaaaacattcagccgctggattcaacggcattgtgtaaaaacagtccaaagcttattatctcatttcagtgcatactttgaataaactcagggttctcttctgtgccagagaagataccaaagaaagcaaagccaagacggcgagctatgtcccatgccgtccattcccttatgagtctgtacatctccacattgatagctcccggaggatgacccttcaaaaacaaaacaacaagacaaatgtcactcacatgaatttgccattaaaattacaagcgatcatgacacgacgagagagagagcatagtatcactcaccgccttgtactctgcctctggtcttacatcaagaatcacaaagttgttttctttttgtaaccgttgagcttccttcacgtccacacttctcacctacaacaacaactaaaagctaagctctatgttcacattttgatcgaaagttttagtaaattagagccaatcattgattacccttttctccaatagaagctctctcttctgtctccaatcgacttcagctaaaccctccaagagacacaaacagaagaacgagaggttaatctaaccgaactttaccattcacaagatcgatacacaagatcgctctcgctctacaagttgtatacctgcaggtttggcaggtttggttgaagtgcattgaatcttaagcgttttgtgaccggaaaccattgctgccgatcgaactccggcagagaaaagagtgtttccggaggatttcagacgcaaagcctgcgatgaagatgggtaaggcgtggctattgaagtaagtgaagccatctcttgatcgaagctgcttctgttaagtttctgttttttcagatattttcttgaaaatgagagaatttaattgcacgataatggaagaaagacgatgaaactgcgacttcttttcttcttgttaggaaaaaatctgaacatgtggtgcttattttattttcccgattttctatcttttgtattcaaacgatcaaaagttgacacaacataatcttctcttatcttcttttcgaccaaaacataaaataaaatatttctcttatcttctttagttttctcattgcgccattcttgagtttttgattggatcgcttagatttggttaacctggtttttacgttttcggttataccggtttacctctttttgattaattttctttcacaattacaaaaccaatggtcccatactcccatttgctagtttaccaatttttaaaacggtaagatttagtcgtacaaaagctgttattttcagttttttttaccgccttatcttattgtacttttttttttcatcaatcttattgtacttcttactaatggttatctctctatctttcatctaaaaatatcttaccctttagtgagctcttaaattatgttgttcaattttcttaacaactttaattatgttttaggtattaccgatcacatcattgttcaatagtaaatgttatgttgttccctttcgatccagaacttggtcgtgtacattactaagatacatttgtttttaactataaccagatttgcttatccagatcggaaaatataagtcaactacttgtgttcttgctaccaaaaaaaaagaaaaaaaaaagagctacttgtgttccttcttttaatggaacttataagcacaatcaatctcttaacaatcgttcttctactcttcgttgtttccaagatatggaaagcttgttggatcctccttttgcgtccattgatgctatcaaaaagattcaagaaacaaggaatctcaggaccaaagtacaaaatcttgtacggaaacctcagcgagataaagaagatgaagaaagaagctgacctttgtgttctggatcccaattccaatgatattttccctcgtgtgtttcctcagtatcaccaatggatgtctcaatacggtaccgttttctatccatcttgttttttttttcttcttttcatagatgaggattacttaacacacacataagttgtctatgatatattaggagatacatttctattctggactggaacaaaaccaactatatacatctcaaatcatgagctagcgaaacaggtcttgtcgagcaagttcggtttcactattataccggtgaaacgacctgaggtcttcatacttttcggtaaaggactttcctttatccaaggtgatgattggattcgccatagacgaatcttgaaccctgctttctccatggatcggctcaaggtcttttactcttaactatatacttctcagcttgatttgaaaagaactaatatattgcttgcttaaaaattgtcaggccatgacacaaccgatgggagattgcaccttacggatatttgaggagtggagaaaacagagaagaaatggtgaagtgttgatcaagattgagataagcaaagagttccataaactgaccgctgacattatagcaactactgcgtttggaagtagttatgccgaaggaatcgaattgtgtaggtcacaaacagagcttgagaagtattatattagttctctcactaacgttttcatccccggaactcagtaagtataatagtcacttagtcagtactcttctgctactctcagttaattcgtttggctaaaatattcttgagatttgaagatcgttgtttcttgtgtttcaagataccttcctacgcctaccaaccttaaactatgggagctccataagaaagtgaagaactcgatcaaaagaatcatagattcaaggctaaaatcaaaatgtaagacctatggctatggggacgatcttctaggggtcatgttgactgctgcgaaatctaacgagtatgagagaaagatgagaatggatgagatcatagaggaatgcaagaatttctactatgcagggcaaggaactacttcgattctattgacatggactacgatgttactaagcttgcaccaaggttggcaagagaaactcagagaagaggtttttaatgaatgtggtaaagataaaatcccagatacagacaccttctctaaactcaaattggtaatgttcattttcattgtgttacttgcgggtgaagaaaagggttttcttacacctattaatcttgcagatgaacatggtgttgatggagtcgcttcgtctgtacggacccgtgattaaaatttcccgagaggcaacacaagatatgaaggtaggacacttggagatcccaaagggcacaagcattatcataccgttactgaagatgcacagagacaaggccatatggggcgaagacgccgaacaattcaatcccttgagattcgaaaacggcatttctcaagccaccattcacccaaacgctctcctcccgttctcaatcggaccaagagcttgcattgccaaaaactttgccatggtcgaagccaagaccgttctcactatgatccttcaacagttccagcttagcctctcccccgagtataagcacacgccagttgatcacttcgatctcttcccgcaatacggcctacccgtaatgcttcaccctctcggatagtagttctgaatggtgaggaagagaaaaccaagaatctcaacggatatttggtcacgttatgttctatatttggccttggtcacaaataaagttcagatgatataattcaatagtggataagtcaaattcaaagtgaagtaaggaataaaaatctgaacatgtggtggttgttttagtttcttgattttcatagtcgattctatctaaatttgattatgcttttgaacaaagtatttctccctaatttaatagtgggaggtcgaccatattccgaagtatacaacagaacctagtggattaaaaaccaaatcactcgttgaaaatttcgactctttgggttgttcccacttccactacaattaaatcaaatactaggcgtacaactaaatcaacggcatcagccccattccttcaacgtatggggtcctctgtgtgtctgtctctccaccgacactctctttatcgttgatcactccaacggaccgtcaggataatgccacgtatatttcttctattatcctctgcacttaacacacggtggactacgtactctcacgctgcttcagattcgtacattgcgatttggaatgtttattatatacccaaagagcaaaactttaggtgggccttaaactaattaatggcatttacgcgtcagtgagagtggagtatataacaatctgaagctgaagaagaagaattgagagataacagagagatagtttcttcttcatccaaaagaatccaatcttttcctcaaaagatagtttctggatcgaacgacaatggagattttctactacttggtgtttggggttttgggtctcgtcgtcgcggcgttggagcttagcaagaacaacaaggatcgaatcaacacttcttcagctttcaattctttcaagaacaattatctccttgtctattcgctcatgatgggtacaatggccttcccttctctcttcatctttccctttgtttgtctagttatgtctgtcaaaacttatttatatcctgtttcgatccgatctggttgttgggaagatgttgttaattagtgggtttggttggagatttagatcctctctgattttcttgccaagttttgtcttttatatagagttccatatcacactagaactttaggattttcaataagaagaaaatgttactacattactttgagtacgcgattagtaactaaagtttcaaactttataacattaaaagatccgtctggacttgctaactgactgttttgtgattgcagcgggtgattggttgcagggtccatatgtgtactatctttatagtacttatggatttggtaaaggggacattggacagcttttcattgctggttttggttcctctatgttgtttggtaccatcgttgggtctctagccgacaaacagtgagcattctctcgtatgcttttaagtaatatggaaatcttaactcttttagtaatgttgcataatggtgttctgtatcaggggtcgtaagagggcatgtgttacctattgtattacctatatattgagctgcatcaccaagcattctcctcaatataaggttttgatggtaggccgtgtcttgggaggcattgctacttcccttctgttttcgtcatttgaatcatggctagttgctgagcacaataaggtaaagaaaggtttatgctgtattaagctcttaagctgccatgtttatttataaacttagtgtttttattcgtgatgtatgcagaggggctttgagcagcaatggctgtctgtgacattttcaaaggcagtgttttttggcaacggtctcgttgcaattatcgctggattgtttgggaacctgcttgttgataccttctctcttgggcctgttgcgccatttgacgctgctgcatgctttcttactattggaatggctgtcattctatcatcatggacagaaaactatggagatccatcagaaaacaaggacttgcttacccagttcagaggtgctgcagtggccattgcctctggtgagtagaaaatcttgttgccccttttagattttacttcctgttttgcttctctgtctattgtgatggttctgtgttttgtttctcattgtcctcattgaagaatgtatgatggtaacaaaatttttgtatcttttatcagatgagaagatagcactattgggtgctatccagtcgctctttgaaggatctatgtatacttttgtattcctctggactcctgctctaagtccgaacgatgaggagattccccatggtttcatttttgcaacatttatgctagcttcgatgctaggcagttcccttgcatctcgtctgttgtctcgttcaactcccaaagtagagagctacatgcagattgttttcctagtttccggtgctgcactattgcttccaatattaatgactgtaagttaaataaagcttcttgtgaatcctactttgcgtgctttggtactgactttactttaattctgtgagtgattaattgtttgcaaccggatgtgtgactcagttgttcatagcaccttccaaggtgaaaggtggaggaatctctttctcgggttgctttcagctccttgggttctgtatattcgaggcgtgtgtaggactgttttggccatccataatgaagatgagatcccaatacatcccagaagaagccagaagcacaataatgaactttttccgcattcctctgaatatctttgtctgcgttgtattgtacaatgtaagtccccccaacattctttttctgcaccatagtagctgagatttcgtgtcccatgtctctgtgttgtggtactgactagttttatgtgctctgaaggtaaatgcattccctatcacggtcatgtttggaatgtgctcgatcttcctctttgttgcaagtctcctacaaaggcggctcatgatgattgttgacaaaccaagtatgttgtctctatgtccatttggctcagggttatctatttgctctagcacgctttccgctgacgataagtatatctctatgtttttgcagaaacaaatgactggacaccccttgaagaaagaaacacagaagaagatcccctcaacatatgatgaattaactatacatatgcacattctggattcagtaatggagacagatagaagaagaggactttaaggtatatggtatatagaacgcaacaatgcatacaaagagatcatagcgttgtaagactcgatgcagtagttcgattgtttaatttttcttggctatatttttgaatatgttaaattcaaagacaagtataagttttatgcaatcaatgtgttattctttctttctatgcaacctctaccatcctcaccataattagccagcttttaagaggcaaaacatctttctgaagcatgcattaaaatcattttaaggaaccacatatagaatcactagcatttgtgttcagtcaaagaacaggatagtacctagttttaaagctatcacaaaagatatagttcttggagagtaaagacatttccgagaattacaattatcagtttgctgtgtgttctgtacaaagcacttggtatatgcttttgtctcatgactcatgagctagaagacgggacagcctttgacgacaacacctttagcagttggacaagaagctaagggacatgtatctcggtcgccggaatttccccaccactgcacttcaattccttttcgtccgagtgctagaaacagaagtatggtcataaaagcagagccagcatctaaaccaccagacaacacatagttatacttggtccaccacactcttctgtacttgaagatgaagtggccaaagatgaatgcgacgatgagccaactagtgaagttaactgctgttgctggtggcatcattgcggtggctcccacaaggacagggatatgaatcttggcgatccatgtctgagccggaaacatctttgtggctagccaaactaagagtggagctatggctccaacgaggaagaaccagttgacatttgagtattctccaaggtctccaaacaccctgcgtggtcccactagtccccaaatcacagaggcgtcaaagaaaacgcggtccatgggacaagtccattggctgtctgaaggaagcaaggatgtatcacaaagatgaggaatctcttccattaaccaccaggctgttcctgtgtacacaaccaccgccacaagtgtcccagccacctgcacttgttacagtttgattagctatgttttagttttattgacatctgtctcaagaccaattgataacatgcatacctgagccatgaacatggatctaggcgggatcttcatgtaatgaccaagcttgaagtcggaaatgaaagttagcgcttgagtcatactaatgtatccatagaccttgaaacacatgtttgcaacaggacgttccgggtagatatacccgataacatactctgttatgatattcaatcccggtgcctgattagtggtggcagctatgacaccgatcaaaggagtgaaactgatggcaatggcacaagcaagtaacactccccaccaaggaagctgcacagtagcgttgtagtgcacggagatgaacatgataagcgcgatattcagtaaaaggattaccaaaaaccaccacaatggaacttccctgtagtttttcttcatgattctcgtgtgtatatccattttcttattcttctgaaacgcccctcttgtctgcttccacaagtcactgtatagacataaagattagtctgagtttgggaccaagatacaaaaagaagtgttggtaaacatcattgaatatatgtaccttccgttgaagactaaaacatggacaatggtggcagacaatgtagcaaacccgagaccataagtaacagcaaagaaggtgctcatattgatggacccggtcctagagtaaaccacacggtcaagatggaatttgctatcaataatgctcaaaacatcataacgtgagccattccccatgaagagctgactagagaagatagggaaggtcttggcatcataaatgttaagccagtaacaaacaggcgtgacgatatacataaccagcacgaaaccaatggctacattgacggaagcgaacaaaggactagctaaagggcttccaagataagcactaatagtgacccaatcaaaaccaatggaaccaatgccaagaccatgttcacctgaaccgagttggtttaccagaattgatttgggattgagccaacagacccatgagattgatgttaacatggtgaaaagataaccaggaaagatgtagtaagcaaagctagctacgaggacgattaagaagaattgagttctactcatgcctcctcttgatttcttttctttctcgtgtaacgcaccaaagagagagacttgaacaagattgcttggccaccacatttcaccaggctcaacaaggtgtttcctgaagagaccagcccaaccaaatccaagaatctaaacacaagaaacgatttcaaggttcaataaactgcaaaacaagaaacagaggataaagtgaagtgagagtacctgagtggtgatcatgacgagaaatgcagggaggaaaggaagagaacgtttgtagtaaagcttaatagcactaagtatgtgagtagcgtaaacagagccggcgccggaatttgcaaagatagttatcagaacatgttccttgacgttgaaggcacccgggtttaaggtaaactgaaacctcgtaccttccaagaatctttttgtcggaagcactctcgccatgagatgaccaagcggcacgacggcgatctgagcggagattccggtgatactcaacggcatcgttctgtaccagaaaaactggttgataaaggagagtacaatgcacgcgcctataccaagaacccacatccgaaatgttaaaaccggtaaagttgaatcgtcggtcttgggtacagtgagctctacctccggtacaacgcaccggtcatcatcatcatccataaccggcgtgaactctgttgctatctctcccatcgttttagaagagtgagtgttccgttctttgggggatgaatctttttttatatgtaagatcttgattgatactctatcgcaattattgaattttgatgtttatatccattaaggaagtctgtctttttccactaatatttatactattttctcactcgcatgttattactgaaataataaaaatatacatggcttgtaatgtttgaattttttgtagaagaaagagaataaatcagagtggaaaacgacaagtgatggccgatgggtcaagtgtgtaggagggaaaaaacagctaagacgatacatagttttgtaatttcaaaattagacaaaggaagccaacaaaaaaagagtcagattattattaatagattaatatacagaagcataagatatatatgaaacgtcgaaaaagaaaacaattggttttacttgttttcactcgagagtataaaaataataatgcatctggttgtaatgggtaacggagttcacggcacaaatgtggtgtatattaaatattattcaatatttaaaggtgttaaattcgaatactgatataacaacggttcaatcacattccattagattatttatgtgttctaacttctagtcaacgaaaccaatatgattatgaatttgtcatcaatggtgaagaatctaaatagactgaaataaatattttggtgatcattgccattccagctgtacacaaatttattgtcaccgaaaaccttgtatgtatctaactagaccgttaatgatatgtaattagcaatatatacattgaataattgattttagcaagtgtcaatgaaacttttattctaacggtaataacaagcaataaccttatggtcaactttggttagagatcacatcaaaactgtataaatacataagtcggatattaattcaaaacaaagacttttgggtcagtatgagtatttcgtcgtcttctaatttataaatggatcggaacacccaaattattatcgggaaaaacgtacggcaacttgtttatagaattcaagttgctactaaatcatgcgccacttgatatatttgcagtcgcaggtccactcttcctagtttagtaccccatctaggcacatatatcgaaatagtttaataaattgaatcaaatactgaattgttactgatatatatactctgtatgtttctcgaaaatacttaaatttggtgtcatggagttgataaatttctgtaagaaattgaacgtctacagttcttatggtttagggtttctaagatggatccaaaaaaatgcaggaaccgaactatatacggcttttgagaacttaggttatcctttagacgtgactttcaaataagtatgtcgatgatttgataagacatgtcgttttatgatatgtagggacagggaaataaaagcacaatgtgaattaagactttagattcaaaaagatgcttcatgcttgtagaaatgatgacgattgcgacttgggacaatggacaagtgctatgtcattacatatactgatacacctaacctaatgaccaaataaggactctttacacgggttaactaaacaaatatatcccaactaacatttccaacaaaataagccgataaatgtaacatgtaccgaacaaaacattattaatcatcgtaacttttttttaggtttgaattaatcattataatttaaaaccctaaaaccaacttataagaaccataattgatcagaatccagtttaagtaaataacatagaaaattttgagtcagataaaaaagaggaaattgtatggttagcaacatttacattttacagaatatggatatggtaaatgagaagtgtgtggatcacaagaagtgaatgtgctttttctgctttttaaaggatgaatatgaaaacgaggctaccctcgttattttatttaatgtgaccactgtttagctggaaatcacttggagacgactttaaagtaggctccaaaatctaaagctagacaccagacaaaagactttctatattgtttgtcttaagataattctaaaaatatcagcatcgttactttattgaatgaatacttataagaattgacagtgaaaatgaaactagtgttgaaaagagatgtttggtcattaaaatcaaacaccgaccttaaactaaaaaagaatatcacttcatcggctcctccttttttcacaacttatatacaatatacacacacacaaactgagaattagaatgtacatgtgaatgggctggtgcagtaaatgcattattacgtgttaatgtacatgtgaatgggctggtagcagtaaacgcataatctcaaaaccaccggtcaccgatgcgtgtgcaagtctcagtcagaacgtgattggaccaagtctcggtgtataaagacacacagtccatcaccgctaaataatgaccacacggatgggcccatcaatatatcaaatttgtgggtcttttaatcttgtttcacaagtgaattattcaaatgggcctttatttatacaccataaatggcccattagtccaacaacatacaataatgcaagtggtcggggtcaacgcactagaaattccacaagaactaaacgataagaacaaataatcttcatagtctctcatccaatcttacaaactttctgatttcctttctacattcatcgaccaatggcagcaaacaaaactcttcctacgtatttttgcagaaactgcgagaatccactagctctcggtgaagatctcatctccaaaaaatttgtggtaacaaaaaaaaaaaactaaagaatgttatagctttaccaaaaaaaatcactttttcatttcttatcggatgattttctagagatgatcaagtctcttcataatctccattggttataaaatgcaaaatgtttttgaatatggattatagggagcttcagggccagcgtttatgttttcacacgcgatgaacgtggtggttggaccgaagattgggaggaaactgataaccggatcgtatgtagtggcagatgtgatgtgcagtaagtgtggtgagacgttgggttggaaatatgttgagacattcgatcttaaacagaggtataaagaaggcatgtttgtcatcgagaagctcaagttgaccaaaagatattgaaacctagtcaagaagaataatactcttggagggttaagctaataaataaatgaaggaaacttgaggattgtatatgtatatataacctttgttgtataaatgtcatcactatattggttgttctctataaagggatttgaaaacaaagtaaaaaagatttaatctaagataagattttttttttcttaaactatatagaaatttacagtaagaaattaaataattatgaaaaagtataagaaaatatgaagagattccacatttccattattcatcactgctgatacgatttactttctcaatttaccagtcataaagcaaaaacccagaaagaaagaagtcacaaggtagtcgctacacggcatatatgatcagagactaaagatcaaaactttcatccaactccaaccttattctcctctcaattttgtcttgcgtccttgttcgatctgttaaacccttgtaagatccctctgaaatttcctcagaaaaattcatttcaaagatcaaaatcgaatctttcgtctgatttttctcaatttcgttgaaccatatatcttactgcgtaatttcctctccggtaatatctcattttgtttcccttaccctaccaaatatatataatctgtggtctcttcttttgacccactcttatttgtttattattgaaattgaggtactatcgtggaatctctagtcttgcacgctaacacctgcccactgttcttatcctctatttttcagacattgacgtttgaagcttggtgaatttttggattctggtaaggtttagaaaccctgatttctggttttccatgtgggttctggatatattgatggatttttatgtttttggtgaaaaggtgagaacttggttggagcaattgatcacgccttgaaagtgtttgataaaatggctcaggcaattggtccaagactgtatagttgctgcaactgcagaaaccatgttggacttcacgatgatatcatctctaaggcttttcaggtgaatcaccttgatcatttcttttgttttgtttgtgtcccatatgattgatgtagaaaattaagtggagaatcgatgtaagactagctgcagctgagcttagaatctaagaaaacctgtgactttattgtctttcctgatcaacgatcgatgctactgatcatgattcagttttcctactaagttacatgttggtgttagagtcaaatcaaaacttgaaagttgatccttggaaatggaaacaaaacataagacacaaagtagcctttgactcaaattgttacaaatcacaaaagtagtcattctttgagtatgcttgtggtaggttgtggactcaattcaaaatcttatgttagacagcccggcttttgtgtttcttgattgtgaataccaaattcttaatcacggttcttcattaccacttaccagggaagaactgggcgagccttcctgttctcccacgcaatgaacattgtggtaggacctaaagaagaccggaatcttctaactggtctacacaccgtggctgatatatcttgtgttgactgtaacgaaccattgggttggaaatacgagcgagcttatgagacctcacagaagtacaaggagggcaagttcatattcgaaaaggctaagattgtcaaggaggattggtagagctgaggaacatgatgaattcattattggattggctcaaaaatgtatatagataaaatttggctttgtgatttcacaagtcatcatcagccatttttccagttcttcattgtctctctctgtatgttaattatgtcgtctcttgtgttcaaactatggatttgttcgaacaaggtttctctgttaataaagatgttaatagcttctcttgtgtttcgcctcagaaccttcctttgtaagtgtaatatgaatctccatactttgtctttgagtagcttggaagataacttactagggaaaaagaaaggtctgccgtttaaaatttagactacgtgctgctttatgtttaccaaagctaagtggttgtcgttttggcgcaataaatgtgattaccagaggagagggagagagaaaacggagcgagagagatgtatctgaagagaccgatatggagcgatggcgcgtcagcaacgccggagaatccatcagaatcggagaccggagaagaatcagacgcggcgtcgatggtagtcgaagagctggtgacttctctcaatacacagagactttacagggagctgacactatccctcaggaccggtttacgcgatgcttgcgctgaattctccttccttcgcatccgtggtcttagatctcttctcaaaactctccgaactgtcgctgattcagattcaatcattcgtctcttctctcatacccaaaccatttccgatctccaacgtctgatatctttattttcctcattgtcgttctcaaatcgatgctgtgtaatgtgttatctgatgatggaagcttcgtgatttcgtagtggttccggtgctttttcaacattcattgaaagaagcggaggatgataaagtgacgagcttggatcatatattcagtgtggagccgatgaagataacaagtccttctacggatgctgaggttgctgttgctcttagagttctcgaaggatgctgccttctccatcctcagagcactgtcctggctcataagcatggtgcagtccgcgtaagaaagactttcctttgttactttattacttgtctattgatgcatagagaactctagaaactagaatcctgcatttgacatttgtcacctctcactctgatttggcgaaaagggagactcttgtgtatgagacatctttgaacgtttttcatttctttgtctatttatgctggacccttcatgttttagattgatgcagtgggatgttaatgtgattgggatgctcataaaatgtttcaggtaatgatgaatgtattatcaacacgaggagtacttgagcaaggagcctgcttggatgccttaatctcagtattgctggattcatcagcaaatcaggtggtaagtattcagtttctgttttttagtaacaacttctgtgtttataaacgaaatagaaagcaggttgttaagttttgattctcagacagatacacatttaaacctctagttaaagtttctgtgtatatcaatggaacaaactggccttcacttgctttttattttaacttttctaatttctcatggtaacaggattttggagcttgcaatggcattgaagaggttgcaatgctcatgcgagacaaacaagctgatgaaaacctcaggtgaataccaagcttttgttcttcatggcacttgttgtggcattttgcatatgtttatattacagtatttacacgataaaaattgccgtcaacgaagattcatttcctttttgtctcttctggtttttatgtttttagtaaattttaaatcgatttccttgtcaaattcattgaatagtcttcaaattgtctagttaagctcttctcatctcaagttttgtctcatacatccttaagagttccaactctaaggtcactagttatgatttagtgaatgatatcatccactttgtaagtaaccgatggtagtggtttaggcttttggtcatgtttagttccttactgattcacaggttaagatgcggagagttcttactactgttagttggacacgtaaatgggaaggatcgatctccaatagcgagtgtaaatgaagacatcaggcgcctcttgggtgaaaaatctgcttctttaatatgggcggcgagtcaattcggttcaacaggtgatcctgaacaaagaatcacggcgcttcatatccaggctggtagagtgctcgagtctcttgacttgtactaactgtcaaactacttttgttttttccttatttacataataccaagttattattatgtgtaacaatgtaacaacactcatgaaaatagagttgtttaatgatgttccactttcgaataacacatcaaccacaatccacaatcattggacaccaaaacaagaaggattcatcatactagatttgtcatatgaacacaaaatcaaagagtaggacaaattctacatttcaggattgattttgtctcacttttttccttgaatgtagtcaaataactcagtgtcatttcttcctttcattttgcttaagtttggagcgactctattactcttttgtctacgagatcagtaatgctatgaccggttgcatagtcactactagtcaggacattcacaattacaaaatagaaatcattgtaaacatatttatgaaacacattaacaatgtgtaatcgttgacccatgagtccatgaccggtcaattgaaattgtttatcttctacttgtgggtcacaaaaatctcgccggcccattatatatattatccggagcttccaggagttgaggttgtgaagccatagatattgacgaaatacactttttgtctttttgttgctgtgcaacgtcatagatctaactccggaagaagaagaagatgagtgacgaaacgacgtcatctccgtccccagctccggcgaagaagaagcagaatctgggatggatggagtggatgaggggatggagcagtgttttcggggagattctcttccagaggatcacagcttctcatttggagaatcctcttcctcttccttccgtcaacgacctcacttgcgttgtcactggctccaccagcggcattggccgtgaaaccgcgaggtttgttctcttccccgtttcttccgatttacaaccaaattgagtttgatttcgtctagattgggactcgaattactgaaaacttccctaagctttttagctcttttgcttcttcggtcgcaggcagcttgcagaagctggtgctcatgttgtgatggccgtaaggaacacaaaggcggctcaggagctgatactgcaatggcagaacgaatggtctggtaaaggtctcccactcaatattgaggtaaccttataatggtgatgtacttattacaattcagtaatgtgtattactgggactgaaattagccaagaatgagataaagcgttttgtacaatagaaatttcaaataatatgtgaactatctagactgtggctaagccaatttcttgtatattagttagagagttagactattggcttgtaacgtctagatagttgataataatactctgttttattttgtaaaggcaatggagattgatctactctcactggattctgtcgcgagatttgctgaggctttcaacgctcggttaggacctttgcatgttctgattaacaatgctgggatgtttgctatgggaggttggttttattgccgttttagctataagcattgagtttccccttctgttgtttcctgtatctattttcatcatctctttgttatgatctcaaagtcatacttgtgaaccaatcatcatcatcatcaacattccaacttgatggacccaattggtgagaactggcatgttctttcatagcaactctgtccaatgggtctcctttttaaatgattggttgtcagatgctacattttctgcagtatgtgttgaggaaaagtaaccttaaaatgctctgttctctgatttgtgcagaggcgcaaaaattctcagaggaaggatatgagcagcacatgcaagtgaatcatttagctccagcgctgctttcagtacttcttttgccgtctctgatccgaggctctcctagccgaatcattaatgtgaattccgttgtaagttctctatgatcactgatactgcaggctccaagtctgtattctctagtttatattctctttggtatgagtaatcatgttgacaggttgatttgtttgtgtattctgtaacttgaaaacctctggtcttgtcaattggttgcagaatatgtagataactgatatagatctctctaaatcactgaactacatatgcatattgtattaacacagtcttggtatagagaaacgatacaaccatagcttgttgaaagtttcaaccccaaatacgcttccatgactgcactatgtcattactcatttcagaagaattctgtgcctggctgtttatgaaaactgaaacagtttatatttattgtctttgattattactttttcatgcaagataatgggttgtgggattcacttttgtagatgcatagtgtcggttttgttgacccggatgacatgaatgttgtttctggtagacgtaagtactcaagccttataggatactcaagcagcaagctt

SEQ ID NO: 638 - DNA, 43955 bp, Arabidopsis thaliana
tttgtagatgcatagtgtcggttttgttgacccggatgacatgaatgttgtttctggtagacgtaagtactcaagccttataggatactcaagcagcaagcttgcccaggtgagcttacagtaatgacatctgccgtagttttcatctgccgtagtttccattttctgaaagaggcttattttcagaaactggtgagttaagtctcgctctctgatcttccatcttccagattatgtttagtagcattcttttcaaaaagcttcctctggaaacaggagtcagcgtcgtatgtctatcccctggtgttgtcctaacaaatgttgtgagtattagcttcacttcatttcgttacaagtgcaggattcctctgttttctcagaaattcattgcgttgaactgcctatttctttccgaaatttacaggccagggatctatccaggattcttcaagctctttacgcagtgataccttatttcatattttcaccccaagaaggttgtagaagttctctattctcggccacagatcctcagattccagagtactgggaaacactaaaaaacgatgattggcctgtttgcccattcatctctcaagattgccgccctgcaaatccttccgaagaagcacacaacacagaaactgcacagagagtgtggaaaaagacgttagagctggtgggtcttcctctcgatgcagttgagaagctcatagaaggggaaaatatccaatgccggtatggagcacaacacgaatagtctttcaaaattaccacaggttaagtgacccattacagatcaaagggtaggtaattgagaaaatatcttttttttttgtttccttgtattaatctacacgatacagtggggaatgaatcccccaggcatgtagtttgcttgagaatgtttgattgttggataaaagtcaagctttagctaccattccattgcttttacttacaagtcttgttcaagtatttggttagtgtgtcttggagttattaagatgttcagtagtagagtatggtagcctgggttggtgggtagtttcttgtttgagtttagggtattttcgtaattttctttattgtttgtggagtcacgttgctcatatatagttatagggatatatatcaattagagtcatcatctctcttactctcatggtgacaaagtcacaaaagtgataaactctcctttccactttctaatgtttcttgcttaaatgagtattccatgtaaaaatgattcactcactcgtatgggtgggttgggttttctcttcatgagatgctcatttgagcaagcaatgtttggaagtgggactatttaatatcatgtatgagttttatcttttgttataagaaaaaaagttgggatttcattttcgtgcccacttcacgtgaatctaatgccttcaagtttgtggtctaccttattttctcttatggatacatgtcaatttacgtgtcgtatgagtcaagcctttaatcatcccaacaccatgcacgtcttctagatttgttttcgaccacgattccaccacaaaatttgacattgttattgaattcattaacttttttacgtgttattgtgaaatatttatttaattttgttggtaaaaggagcaaaaaagattagggtacaacacgtcgacttcttccccaattagacccatatgtgatctgtcgtcactcgtcgccaagtttttttatgtgtcgtcttttaaactttgatccaattcattaaaaagtcttaacgcccacaacgaaaaggaacttctctttttgtttggtgactgaatcggtggaaaacaacacaagtttgttcctttttgtctctccagatcccttggcttccttcttcttcttcatcctcctcgtgagactctgtgttgaaatttctctagggttttaattatcggcgttggtttttcgtttttgagaatttgatttcgtttttagaaataatgggtgattgggctcaacttgctcagtctgtgatcctaggtttgattttctcttaccttctcgctaagctgatctcgatcgtcgtcacgtttaaagaagacaatctctctcttactcgtcacccagaggagtctcaattggaaattaaaccggaaggagttgactcgcgacgtctcgattcctcttgcggtggtttcggtggtgaggcggattcgcttgtggcggagcagggtagctcccgaagtgatagcgttgccggtgacgacagtgaggaagatgatgattgggaaggcgtcgagagcacggaactcgatgaggcttttagcgccgccactctttttgtgactaccgccgccgcagatcggctttcgcagaaggtaccgagtgatgtgcagcagcagctttacggattgtataagattgctacggaagggccgtgtactgctcctcagccatcagctctcaaaatgactgctcgtgccaagtggtatctctctctttcgttgaatctgctgtgccattaacttctatgtatcattttctggtgtttttgttcaactgtttgagatttgatttgaggtggaaatttttgaggttttaggttcttcatagacaatcacctagtttgcttcttagcttatgcaactgctggacgatgatgtggtttttactgttgtaacagttgattgtatatggaattgtggtttgttgtaagattgcaatttcattgattgggatgtgccatgatcttgttctatctcaggcaagcatggcagaaactgggagctatgccacctgaagaggcgatggagaagtatattgagattgtcactcagctttacccaacttggttagacggtggcgtggtataaagctttttccccttttctttgtttgattgcttcggtttcttcctctggcctgttcatgtgagcttcactaacagaaagccggaagtcggggtggggatgatgcagcctccaactcaagaggaaccatgggaccagtttttagctctttggtttatgatgaggagtccgaaaatgagttgtaaggttctcttcttgtattctcatgtgttttatatcctgatccttgcgttcatgtctagattagatataagtatcctgatttgtgaaagaggctcataaactcggtgaatatgtaacattactgtctcgttctagctgtagcaaattttgatggtgaaatggctacaattgtctcatggaactttgagctgttcgtttcttcctgtctatctgaatgaaacactaatcctctgctcattgaacttttgttttatctctcaggaagattgatgccatacacggatttgctagagaaggagaagtcgagaatttactgaaaagcattgaaagcggcattcctgtaaatgcaaggggttagtctctgcttgtatattccgtttcttggaagttcattctcgtgatgttggatctgcattctaattttcccataaactgcagacagtgaaggtcgcacaccattgcactgggctatagaccgtggccacctcaacatcgccaaagttctggtcgataagaacgccgatgtgaatgctaaggtgacgaaagagaaattcctacccagtcattatctgcaaagttagcaacttctttatttatgtgtttttggttcttgtgttgaacaggacaacgaaggccaaacccctttgcattatgctgttgtatgcgacagagaagctatcgccgagtttctggttaaacagaacgcaaacacagccgctaaagatgaggatggaaactctccccttgatctctgtgaatcagactggccctggatccgagattctgcaaagcaggcagactaaacaaatactaaccacgtcttctctaaatccgcaatgtatatgatcaaatgacttagtaagaagcttttctttactttaaactttctttccatccctaccacatcactgggatgttccaacactatatcacttggatgttaccaagtcttgttctttgatttctttcttcttacattttaacaatcttttgttcctttaggctttatgatatgtcgtaaccggttttgttggtttgctataaatacacacatatagacagaggaagagtcattggatcctcaacgaataaataaccgactttggcggcaaaaacggttgatagaacataatttaatgatttaaggaaagcccccaataaagcaaatacaaaaacagaattagcaatcttcgtggccctttcgtcttctctccctaccccaccttggactaccggaaaatggccaaggtggtggtttacacgatactaaccgccaccatcatcttcctcatcctcctcgctcataagaaacaaaaccagactcaatccattgagggtctcataacccgccgcatcggacggaggcttgaaatgccggtgtttgaccctttggtgacccggattgagaggttgtctcatgagaaagaagctggtacgaagaccgtggaggctgcgaaagaggagaaagatgatatgtttgaggagtattttgcacaagagagaaggcttaacacgacaatgaggatcaagttcttgtttcctctgcttgacgcgtctccaagagatggctttgtgagcttgaaagagcttcagacatggatgatgcaacagacagaagacaacatggtttacagaaccgccaaagagcttgagctacaagataaggacaaggacggtgtcataactttcgaagagtacttgcctcaattctctaaacaagacattggtaatatattaacttgtctttgatccttcgagatttttcttcttcattatgcaaataagaaaaaacaatgataatatggaaacagagaaaaacgagaagggtcacggtgaagccggttggtggatggagcaattcaagaattctgattttgatcataatggctctctcgacattgaggagttcaacaagtaattaatatgccttgaaaaatctcatcacttttaaaatttccgaaaataaaaaatgaatgaaaatatgggatttgcagtttcttgcaccctgaagacagcagaaacggagatacacaaagatgggttctaaaggagcgaatgacgtaagcatttcgtgatatatcgtgtttcgatatgatcataaatgaagcttaactaggaaacaacatgttgtttgatatatataatatataggggcatggacacgaacggtgatgggaagctagagtacaaagagtttgtaaaaaatgcatatgaaatgtataaagaattcgcaaagttcgagaaagaggaggatgagaatgtgccaacacctcagcttctgttcgcagagatggacagagacaaagacagattcctcgtggccgatgagcttcgacccattttgcaatatcttcaacctggtgagatgagttatgccaaattctattctactttcctttgccacgaggttagtctctcccaacctaaatcttaatcttaagttttctttctcacaactttgaaactcattaatagtggatgtatatgtataatgcttagactttcaacgtccaataaattttaattattttgttaggcggatgaggataaagatggtaaactatctcttgaagagatgttgcaccacgaagatgtcttttacaaggcagttcatcacgaagacttggacgacgaagactattttgatcatgatgaactctaacttttgaatttgttttccttcaaattttaatcataatttttttttgttcaattgacttcttaattcatctcgtctagaatgggtatgttagattgttaggcaacgagattacatgcacaaattccaccgtggttgcgttgatagttggcttttgaagagtccacaatgtatataatacaatgtcaagattttttttttttttttgtgatatgataaaccagagaatgtcacaaaacaaaaagaattatagatgcctaaagaaaatatcaagtagctaaaaattggaaccaccaactgtggcatgagccatgcgtttcttttcaaaaaatttctcttagtcgttggaagatgcatttatttgtaaatgtagtttcaacgcttgtgaaagtgggatatataataatataaagctggttctgtttgtgaggtatcttcatatctccatttctatgggaagactagagtgttagacatagttacaggttttatatacactaacgaaagagatagaatgttcaattcacttaagatagatgtgaagacatccatatgccaacagtaactaaaccgatagtcgttgcagcctgaaccagttcaaccactacgttttgtcgctgcgcggggagattcttccactctgttcttctgtttatgcaaaaatcgaaaccaaaacacgttaagagtatatagattgaatagctaatagataatgtatacagaggtttcatatagcagtggaacttttgtttagatgaacccctaccctagatcagcaataatgatgctaatgttgtcctgagatcgccggtcctgtaacgttggaacaaaatcgtacatttgaaagttttgattcctaatcaaaagaaaggctgaggagggtattagctattttaccaaagctacttgcgcaagagattcacaagcaagctgttacatatggacagttaggaaactagttaagccttaaagtcatacatgattattgaaactaatttgataagaagatgaaataaaaacttgcctgcacattcccatgtttccggagctgatccctaacataactaaccacatctgagctgtattggcaaaacattgatcactgtaagctctatacttttcccaattaaaaagcatatgactgaatgggggaaagaggaaaaagaaaaggaaacctcttcatgtagtcccataatccatcagaagctaaaataatgaattccacatcagatgtcagaggtacttggaagatatctggagtcgccacaaccatgtcccctttaaactcgattctgagaatttatctcatgagaaacagatatccttgaaatggaataacaggagagacgagcaaaagtagaaacagcttccaagtagttcgttacctggaaacaaacttctcggaccatcttccttcatcaacacccttctttaacatactgtgtatgaaacccttatgagcaatgagataacaattataaaaatagaagagccgttgtgagaagagaaagaacccaactcattcttctttgtcttaaaccggatgtcaccaaaagcacgagatacagctatgtctccacaaatccttccattgacaatctgattatacaaaaagcaatgaatcggttttaagccaaattctcggagagatagataagcaaatccaatgatacttgaggaatttgaaacatggaaaataagaagacacacccatccacctgcttctttgacccttttcacttcctgaatagctgctctactgcttccatatggacggtgataatcagtcaattcctcgatttgcccagatcgagataagacctatttcaatgcattaacaagactttagacatgaccaagttacaatgatccatttataaataagaagacttactgcacacgaatcaccaatatgagcaatgaaggaaacatcatttctgatgatcattacagtggctgttgaacctgattcatcttcttcgtcaccgttagcttctagcctggatccaaacgcatgatgaatcacttcatttcactcaaaatcatcaaaattcattcaagctctgagaaatttaagctcattttcaccatttgagcaaattgcggtcaacgctttcaaaggccttaatcaaagcttccttgattgctgcgaaatcgcctccattcaacaacgatccagcttgcaatgcaccaacacactctttatacagctcttccctatcaatcatcatcaccatcgtcaacacttaaaccctagaagacagagcttgcatgagaagcaacacaagttacctgaggaatttgacagaggacgacccagcgtggccgtcgaagaccgctgcgtaggagaagctatcgacagcatcagaacggattacgatgtcgtcttccatctcatctcggaatccttgaacactcgtgtaaccccaacgaatcggcgtcacgccagtcagagacgacggagcgtcgatcgcaatcgcggagcaacggtgacgaccatacgtgggatagacgacaaggccaccgccagcgtcggcggaaggataggctgagtggcggagagtgttggagtgaaagcgatgaagatgcggcctcagaagcgccatgactcagtgagtcaggcaaagcgagttaagtagaagaagagaaaaatcaaaagagtgtcctttacggttagtggccgtggattttcgtaaaaaaatatctgaggataagagaaatcaacgcgggcttcttaactaacttaacggtccactttataagttttgggcttaggcccaaatcgtgatcaatcaacttttatagctttccttttcaggaaagtattattgctgtcgctagcaactgcaaatagaaaggtcatgtagttatgttttgtataataaatttttggttttgcataatgctcttgtcctccttcatttaagaattaagatgttccctattcttttacctttttcaagtataattacaataatcctatttatctagaggaacagtgtagtttcagggtttaatttggtaaaaagttaagaataaacttttcctcatgtctgtaaattatgtggtaatatgtatacagatggatattaatattagtctataaaattaactaaagatttaatgatttataaaagaaatcgaagagatttgatttaaatattggaagaactcatccgtggaagattctcttgtctccgcctccatgggatcacttgcttaaatccttggtaaacccttgcctgcattttattattatgtaatcaaaatgagcctaaaaatgaattcatatgcacaagccgaaaaaaacaaagcatattgaaaaaacactccatactatatagagtaaccaaagacttttgaagggaaaacctaaactttttaatcaaaagggacatttattcaaatcccaaaaatgttgaagttttgttttgagttagaaatcattgaataaagtttgaaatttttgataaaacggttggtactttgaacaacgtaataatgtattttcctttttttgataacgaaaattatagtgtttgcaattctgaatcatcgactacctttgactacaaaagaatacgattaacttgctagttactagtaaactacccggtaagagtgtgtaattagacagctaaaaataagatgttagaaaaggtgatgagtgttcaaaacttaccaagaattgcgatttggaatgagagagattcaagaggcttccttttcttctaactctactaatcttcaccgttgtaccgccgccaccgtcgcagcagcggctattggtggaacgtgaaaactcgaatctaccctcagaggctctttcgcttctccttatcactgataaagaccggcgaggtacatcgtaaggcccatcaagaactgtggtcggagatggctcatcatcggctggaaaaaatagcctcggcggaagctcaaggcaccgcacgactcctcctcctcctccttctctttcgttctgcttggaagccagcggtttgttctcatcagagacgcgaggttttcccggagcttcctcccatagaaaaggtactgatccagcgatgttcacaggcggcgtcgctagccctggagtgtcacatgctctgttaaatggaatcgagaacaaaggaagcttaggagtcgcacaaaaccgttcttgatcatcaaattcaaaatccatcgccttgtttttctgaataagaaactttctttgacgttatatgaaatgggttgggatttagatagatagagacggtatattttggtttgagttatatgaacacaagaaaagggaaaagagaggatgaataatgtgaggaagtgtgtagtattttatgaagctgaaagagaaaaatgaacaaaacgctccttgtggcgcttcttattcacgagagtgatcccaaagaagagaagaaaatataaacaaagtgggtgggtggtcctacattacgattttcctaacgttgggtcctttcaaatttcatgtcgagcctttattgcctataaataataccattatttattgttattattatataaagaaaaaaacaatgataatcagagctgcgatagtggtaacaataaataatgtatataaatcctgaagaagtcttcttcgtcgacaaaaataaattatcttaaaataaacagaggtgggtcgttgtaggtttatcctcgaatctgtgtgttgtggaccgtagttatgcctaaagatgtaatacatgcagtagtatataaactgaaaacaaaaatgtaatatagtagttttttcatctagtttagtccacattatttgctatctgtaaatctgattaattgtccatctttatctcaaaacaacgaaaacgaaatagcctttcatacaaaaagagagtatcaaggctgtatttgatggatatacattaaacaaaaatgggtgaaagtgaggaatgtgctacgataaaggtcaaaaggctgctcttgtcgttgcatgagatatgtatgagaatagtgaaatgatttaatcatggaaaaaaggacggtaaaattaaacagatttagaagatattaggctgatcatgttatccttgtgagcccccattcaagtttagatacttcaatgcatctatagtccatgcatggcctgataagagatgcacataaaggtaagataatgtatctatagtccatgcatggcctaattagcaggactgtgagttgaatatatgtatttgattagattattgacttgatgatgtgtaacgtgctccgtttgaccgtaatcaagggcttgctttatttgaagagaccaagaaatatcattttttttaaaaaaatcttcgattaatttcttttgtgcaagtataaaaattgtaaaatatatgataatcaattgaaactgaaagaataatcagttacaaatttcaaccaaacctctaataaagtaaaagaattgacttttttccattaaaccaaactaactattacgatctacgacccatagtcttctttagaacgtatgagctttggtaaatgaaattgaccgggactagtgtgtagtgaagttttttcaagttttggatttcttgttcagcttggacacggtattaatctatttaggagttggtgtgtctgcaattttttttatcaaaaacaacaacaaaaagagtcgaattttgttatttgtgaaccaaaattgataattaagttttaaaaggtcgtgacgttggtagtatgttcactgatcatcgaagaatatacaaagatattgcactagtgaagctctaatatacagtactgttgcttatagggaagccaattttttttaaaaaacaaaggcgtttccaccgctctaacaaaaaatttggtctagttgaacacgccactcaagcatgggatgatcattctcattttatacgtttgacctaacaacgataaaagttacaaatttctaggcaaattatgatgtttataggtttcggattcatacggcgttttcttacaataatattattgtattccaaagttggcgttttcttacataatccttcttcttccactcgcgaaacgagacaaatatgcatgtgaagaagactatcgaaatatcttcttttatttttcggcgaagtgtaatccttgtgatgcaactgacatatacatttccaaatgtaactcttatatatgtactagaaatttaagttgttaatgtctttgtgacttttatggttgtgttcgagtgtcattatctattttactatcttcaagaatcaatggaacactattggtctcaaaagtaacatcatttttatatgcaaatcttatcaaaccatttgccaagttaccgagatgtttcacagtataaatgaactcaaccaaacaaggatcctttggctaaaacatacattacaatgaagaagagacagagaagttgctccacaactgaatagtatcttgagaagcaacatcaattgtaccattaaggaaaccagtgtaccaagaagcagagagctttggagtcctcttgcgaccaggatcgctgaaattcacatggtacattccgaagctggtcgtatatccactcaatatctcatacacatcaaccatcgaccatacaaagtaacctctcgtgtccgatccattcctgattagtcacaaacagagagagagagttaagtaatactggaattataccaatcaatccttatatagtagtaatatggggactaaaagatgcagaaggagaatcatacttcattgcgttgagtacagcgtcaatgtaagcttgaatgtattcaattctttgtgtgtcttgtagtgtcgaatcgcgtaccatcggcatacctgtattttattttattataattgcaagttgaagaatcttaaagaacaagaaagtgtgctttcaagcagacaaagcagagtaagaaaacaaaaaagaatgaagtgttgtaccattttcaagaatatagactggaggattgttatagctctgctttatatactcaagaataccttcaagaccccatggagtagcctcccacttcaaaaaaagcaactgagttaggaaaatcacgagattcaagaatataaatgtgctatgcagatttgcatgaccttaccacaagaaatgaagaattcccagtggctatccaaagaagaagaattcttagttaaaagagttcatcagaagcatttttatactggttaatgatgaaaaaaacactaatcttacgaattatatatactcccatgtctttaaagaagccttcacccatgctgggaaagagagaagctgaaggttggtggtttgtgacatagaatgttgtgtaatgaataattcctataaagtcagatgatcctttaacttgctctgactcttcctctgagaaaactggtaatctcgatcccacagttttcttcatttcatccggatagtctccaaataccaaaggcttcaacatcctgaattttcatagtgatcttcagattttttcctcaagttattgaaacatagaaagaaagttttttttctcaccagccatataagaaagttttagctctttgagttgcgatttcatcatccttggagtttgtatatggagataacccgaatgcaaatatactaagccctatggatcctttctgcttactctgcaccatcataatgaactacgatcatacgaggttcaggttttaagagcaaaaaatgtgtgtatataccttgtactttagtttatacaactttgaagcagaggcatgagctagcaatatgttatggcctgcaatatatggttctgtagaagaatttccagtagaacaattgacgaatttattaggagaacaatgtccaggcggcgcggttccttggtcataagaaccaatggcgaaaattgtagcttcgtttattgtagtccataacttcacatcctccccaaactctctgaagcatacatctgcataagcagtgaagtcttctctgcaatataaaaaacaaacaacatttttttacttacaattcatataattaaaaaatgacattgttagagcagaatcttttgtatcctttacatgattttgcggttgatccatccgccgtactcatcttcaagagactgaggaagatcatagtggtaaagtgtaacatgtggttcgattcctgttaatagttttgccaaaaaattatatttagaagttatgaattggctatagttgcgattatatataaagaccaaaacctcaccatggctttttaggtctttgatgagattgttgtaaaacaatagtccttttggattaatgagtcctcttccatctgtcacaaagacaacaagagtttaagaggtcagaaacaataacatcgttacttgcaaataaagaaacaaggaagaggcgtaactaggtataagtcttgaccaggagatagagaatctgaatgattctaagcccattgttgccatcagcttaacatcttcctgccaaagtaacaacaacattgaatttgagaaaacagagtcagagacttacgacaacttaaaagtaaagggcaaagaagagagagagaggaaccttgtatttgtgatacccatcagatgttacatctccattacctgtatcgtctgcaagttttgaagaagaatatatgagaaattttccaatataaaccctctaataatgactcataatttgaaccgcagagtagtaacctatgatatgaactacacaaagatacatgaatctttaataatccctagccagaacttatgttctattcgtaaattgttcacaaaaacaaaaactcaaacaaaaacaaaaatatatttacaagagttggagaaagtatcccagacactaggagttcttccatcttcagcaacagctccttcccactatttccacaaattccccaacatagacaaaagaaactcgattttatagacaacacaactaagatgaagaacagagaagcagagtcgaacctgataagcagaagtggcggctccgaagaggaaatcctttggaaaactgtttctggtaaaggcatcactgtagcttgttgccaagaggatgaccagaaaaatgaaaagtagagagaaatgtttcatttttattttgcgcctttcgttttagtgtagagttttgaagatttggttttcaagaaaaaataataataaaaaatgaaggtgtttggagttctcttgaccgtagcaaaactgcgcaagtgatcgatctttttctctatgtgacaaatatatatatgtgaagaagaaagattcaagaaatatctcttttcggtttccttgtgatgtgaccgacatatatttccacttatattatgtacactacaatcataaatttgttctcacatgtggatgtggttccatgcgaggggagcgaccaatcactataactgatgatgttaattattggcccaaataggcccaaacatttcataacgtaaggcctatacgtttgacccaacaacgacaaaatttacaaaattctcggcaaattatgattattataggtttcggattcatacggcgttttattctttattctaaagttgggaagctcctttggtagcttggatatctttttttttcctaatgaagggtaagtcgcttggatatcttgcgttgtgaattcaaaatcatattataaaattcatctctaatcttttctaacattagtatgacggatatacatcaaagttacgtttattataagctgattctgagcggtctatcactatagcttgtattttcttttctgataaaagatcttctatttatcacttatagcttgttgtcaaaactatgaccagaaaaatggaaaaaagagacataagattcatttccatttttcctcctttagtctgagttcaagagaatataattaaagggttttagtggttttcttggaccattaaaaagaaaagtacatatcaagtgaccgatcttttctattcattcttcttccactcacaaaacgcgacaaatatacatgtgaagaaggcaatagaaatgtatcttcttttatttttcggtgtaagtgtaatctttgtgatgtgactgacataaatttccaatgcaactctatctctatgtactggaaatttaagttgttaatgtctttgtgacttttgtggttgtgttcgaatgccgttatctagtttttatcttcaagaatctatgcaacatttattggtctcaaaagttacatctttttttctatgcaattcttataaattcattttgccaagtcactgagatttttctttgtatagatgaaataaaccaaataaggatcctttggttaaatatattacaatgaagaagagccagagatgttgctctgcaactgaatagtatcttgagtagcaacatcaattgtaccattgaggaaaccagtgtaccaagaagcagagagctttggagtcctcttgcgaccaggatcgctgaaattcacatagtacattccgaagctggtcgtatatccactcagtaactcatacaaatcaatcatcgaccatacaaagtaacctctcgtgtccgatccattcctgatcagtaagtaaaactggaattagaccatgaatcataatgtagtaatatgaggactaaaagatgcagaaggagaatcatacttgatggcattgagcatagcaccaatgtaagcttgaatgaattcaattctttgtgtgtcttgtaatgtcgagtcgcgtcccatcggcatacctgtttttatatttaaaaaattgcaagttgaagaatcttaaagaacaagaaagtgtgctttcaagcagacacaacagagtaagaaaacaaaagagaatgaagtgttgtaccattttcaagaatatagattggaggattgttatagctctgctttatatactcaagaataccttcaagaccccatggagtagcctcccacttcaagaaaaacaattgattcaagaagagcttttggcaaaaaatatatatgtattatgcaaatttgcaggaccttaccagaagaaatgaagaattcgcagcggctgtccaaagaagaagaactattagttttaagaattgatcagaagcatttttctattggttaatgatgaaagaaaactaatcttacaaatcatatatactcccatgtctttaaagaagccttcattcatgctgggaaagatagaaggtgagggtttgtttgtgacataaaatgtcgtgtagtgaataattcctataaagtcagatgatcctttaagttgctctgactcttcctccgaaaacaccggtaatctcgatccaacagttctcttcatttcatccggatagtctccaaataccaaaggcttcaacatcctgaattatcattttagtcttcagattttgtccgcaagttattgaaacacagagaaagaaagctttctttttgctcaccagccatagaagaaagctttagctctttgagttgcgatttcatcatccttggagtttgtatatggagataacccgaatgcaaatatactaagccctatggatcctttctgcgtactctgcaccatcataatgaactatgatcatacgaggttcaggttttaagagcaaaaaatgtgtgtatataccttgtactttagtttatacaactttgaagcagaggcatgagctagcaatatgttatggcctgcaagatatggttctgtagaagaatttccactagtacaattgatgaatttgttaggagaacaatgtccagggggcgagattccttggtcataagaaccaatggcgaaaattgtagcttcgtttattgtagtccataacttcacatcctccccaaactctctgaaacatacatctgcataagcagtgaagtcttctctgcaatatataaaaacaaacaccatttttatttacacttcatatttaaaaattgactttgctagatcagaatctttttttctttttatcctttacatgattttgcggttgatccagcctccatactcatcttcaagagactgaggaagatcatagtggtaaagtgtaacatgtggttcgattcctgttaatagttttgccaaaattttaattagaagctataaactggctttagtagcgatgtaaaccaaaaaaactcaccatggcttattagttctttgatgaggttcttgtaaaacagtagaccttttgggttaatgagtccccttccatctggaaagtcacacagacaaaaagggtttaagaggtcagaaacaacaatatcgttacttgcaaataaagaaacaaggaagagggtgttactaggtataagtcttgaccaggagatagagaatctgaatgattctaagcccatttctgccatcagcttaacatcttcctgccaaagtatcaacaacatcgaaattggaaaacagagacttaacggtaacttcttccaaaatttaacggcaaagaagagagagaggaaccttgtatttgtgatacccatcggatgttatatctccattacctaaattacctctattgtctgcaagtttcgaacaagaatctatcagaaattttctcatataaatcccctaataatgaacacaaaatttcgaaataggcaattatattgaaccacagagtaacctatgaaatgaactacatgaatctttaataatccctagccagaacttatgttcaattggtaaatttgttcgcaaaaacaaaaactcacacataaaaatatacttacaagtgtgtgagaaagtatcccagacgctaggagttcttccatcttcagcaacagctccttcccactatttccacaaattccccaacgtagacaaaaaaaaactcgattttatagacaaaataatttaagataaaaagatgaagaacaaagaagcagattcgaacctgataagcagaagtggcggctccaaagaggaaatcctttggaaaattgtttctggtaaaggcatcactgtcgcttgttgccaagaggatgaccaagaaaacggaaagtagagagtaaagtttcattttgcttttgctactttcgtgtgagtggaggagagaataaataattgaaaattttggttttcgaagataaaagaagtgaaggggcctggtggccttggtcgttgtcttgaccgttaagtagcggaagtgaacaatctttttctatacaatgtgacaaaatatatgtgaagaagaagattcaagaaatatctctttcagttttccttctgatgtgaccgacatacatttccagatttctgtaattataaaccttgattagtatttctttctgaattgctaaacaactcctatattcacatatgaatttcggaaaataattaatacggtggttgattgagatttatttcccttttggttcatgctaaagtcattgtatcttgcggacaaaaatgctaatttacgtttgacaaacattttggaaaagatgggttatgcagtaaaaatttacatctaagaactacaaatatgagtgttttggtcatgttggggttaaaattcgtagacgttgaactgcatagaccacatctttcgcccaatatcacacaacaaatcaagtgtaatcaaaacatccaaagaaaacgaagagatatcattacaaaagagatttttacaaacacttttttttctttttacctcatgaagaacaacttcaaaaaaacacaaacaaaaacatcatcacaaacgtgtaaaccaggctttctttttaaaccctggaaacaacacctcggatattttttttaaacattcaaccacacataacttagatgatcgaagataattacccatcgatgcattgaaacccttgacaaatccaaagccagattccaaagagaacaaggcagatacagagatcaaacatcaaaacaatccaaacatgtttcctccatatctgttttgccttttgtctatgatgatgatcatgaatcaaaccattcctcactcctttacctcctcctcctaggtccatcttcttctcattccaatgaccttcacttttcgcttccgtctgcaatctcttcttgttcttcaacaccctcaacggctttcctaaaagcggcatcaacgcaccgccttttcgtcccttggacgaatccaaactctgattattactcttaatctccctcgctatactcctcggtgatccaaactccaattccaaatccttattatgattaccaccaatagcagcaatctcagcgaaaactggatctagctttgattggagacagtgttgagtcggattatccaacgaatccgcagtagatccgtcttccattagagactctgtagctgatttcaatcgattgaatagccatacagactccgatttcgctacgacctcatctaaaatcgcgaaatacgaaaacaatccatcgatgatcaaagcgtaggttctcttatggactgtgtgagagatcatcgaatgatgtggaggtacgttctcaatgcatctcaaagctagatcttcgattcctggctcttcctttgaagcgaattctgcgagaatcactgttcctttcgcaatgcaggagtagaacaacatacgttgattcgaagtcattctatatcgaggaaaaaaacaaaatccgattcgaatcaatcggaaaaaaagaattctcaatcgaacagtgtagcgagatacaaaattcaaaattcgatacgatctgaatcggaagaagagcagagatttgagtgattctagatttatctgtctagggattcatcttctcgataccgagattttccaggaaaatggtggaagaagagttccattattggcgaaaccaaaaagatgatgaaaaaaaaaaagttagagcagaaatttaccggaaaaagataaaaaaaacgggaagcagaataacgattaccttggtgaaagtgccctcaggataatttatatttacaagaataccccagctttcatagatcgtgtaatggatatatgacacgtggaaaagttagttcatgcttcgttcatccctgtgctggactaccgacacgtatacactagcgattactggtaccgtgacgatttgttatttcgattttggcccaaactgattagtctgttcggataaataacattaggaaacgcttgaatagaagatataagacgggaaaaaaaaaaaaagaatagaagatataaagaatttcttagcctttaaaatgatgggcctctaagcccaatattaacagaaaagactttcaagtacaagtccttccgtccaacgacccataatcaataaatcttcaatactttacgcaaggttagtgatcaggtcatgtacgccacaataatactatttctctaagttaatttcatattaagttgactatgatttgagactgcttcgatactaaaattcaaagtactaactatgctaataattccattagtcaactgtaattaacattcactaagtcataaacaatgaagataaaaagtcataagatcataatgtttatttgaagaataaaactcggtcattgtttagcctttccatggttctttatttaatctcatggtgggttcaatagtacgattttaaaaattaaaaaacgcgttagatatataaaatataattgttctctggttctccctttgtgatcattcacaccaggttcaacttcaatggaatccatcgtgcccaaacgccaagtgcttgacgacgacgatggtctatatggtacgtttctaatcattcctttattgttatttaggtttttgatttatgagtaggatgtacattgttcttacatagaattttagtgctagagaattccattgaaatggcacccccatggtagattaatgtactcgttatcacatttctttttagttatgggaatcaagattttgtgattttttttattttatttttaaccattcttgagagtgacttggtgaatccaattagttattcttgtcaacttttggctttaatacaaataaacattaatggatctcaaaatggtcatgaagaaagctcgaaaggtcgatctcccgagaaggctttggaagagatacgtaagcaagacactcatgatctctattgccctaagtgtactagtaacatcactaaaacagctctaatcgttgaaaagggagatgatttttctcccgacgaccagaaacctttcgtgctctggatccctaccttcaagttcctttcaagttctcccaaaggtatccatatgtacacgtaaacatgtatatatattgttctctatgatgatgaagataactttttttctttgaatgctgagtgaccggttttttttatctgtaggatctgtcgaaagtaaaccattgaatcctaatctcagtggtatgtgtagacacacttttttatgatggatgcacttttgctttgaactattgcttatatgatcgattttgtatctgtgtaataccagtcgagaacatttgtttgtttatgatgaaaacgtacactttcgtctttaattcctgaatgatcgatttcctattttgtaggaccagacgaagaaaactcatctcaacctgaatccagtggtatgtgcactcatatttctttatgatggacacgttatatctttgaagtactcatggttaaatggtcgattttctatatgtagaaccagtcgacaaaaactcatcgtttaatcgtagtctcagcagtttaggtatacatttccttatgatgatgaacaaaaactctattaaaaaaaattccctttgtcgtccttcatcttcaatgacacaattgccatatatatatatatagctaaaaccttggaacgattgcctactcttttacggaattcaataattattcgtagagacgaaaatagtgctactcctctacaccaagatggtgcaggtcatcaaagttctacgagcacatcaggtcattcccaatgctttcgctgcttcatttctttccaatacaatataaaacaaagacatacgatattttcaaaagaaataatcccatttttcttgtcttgacccctggaaaatatgcagtgtctgagcaacgtggacgttggaaaattagtcccggtggatggataattcatcgttaaacgcccagcaaatagacaacgaattgactatcctctcttcttaccccctaaaatgaacgagttttttgtttgattgaaacccatagtaagtgattgatgatagtgtaatgatcattttgtactgagtttaaagcatagaaatcattgcactattactggaaactaattatttcttaaactaataagtttcataaatatattgcaaaagatgcaatagagtgctagagttttggtaattaattttttattttatgaatgaaatattcttatccaaactcatgtatagcttattggatattaacggttgatgatttgaattttagtttttacttcgctggaaacaaggaaatcatattgatcaaattttccatgtatgataccttaaaaagatcgtttataattgttttgaaaaatctagaaatttaacaaataaatattatacttttgagtaaacaaaataataataattgaacttatatattatcatttttgattccaatcttgtgaatttgaaacataccaccaagaaaaaatcttgtgaatttgaaatagaaattttccctcaaaaatcaacgaaacaaacaaatctaattaactaaaagtctaaaatacaacttaatgaaataaataataaatcctaactaaaactttgacaaaaaaaatcctaactaaaataaaatattagattattgttttgataaccaactccatttatatgcacgatgatcttcggtcatttgattaaagaaagacctcatctttagaaaagtctacatataattaagaaattaatgtgacaatgtcatatttcttattatatataattaaacatggttgatagcaaaccggacagaacaaattattaaataaaacccttttataaaacttctaacgaaaatccgtaattctaatcaagccataaccaaatagaagccacataatcccaatacaggtcgtatatgtattatttttttatgactcggtctgttaaatacaagcacaacaaatttaaagttcgaaatattatgttaatagtcaactctactaatattcctcaagtcacaaaacaatgacgaaaataaaattcacataataagaatattccccaagtcataaacaatgaatgacgtaaattctagaggcattaaaatgaaaaaaaaaaaaaagaagacattttcaaactctaaaacatacagtcacattcattgtacaaaagcttttgattgaataaaattttgcattcgattcaaaaaaaaaaaaaagacattgctataacaacttcttaaaatgcgtgacttttgcacccttgactttacagggtcataaaatattacgtataattaacaaaaagaccaacaattggaataatcaatttcttcctattattgaatgttaacttttctataaacctgaatcttatgatagaatgtacatgaattgtgtcccattgcataagaacttaaagcatatgcagtaggagattttcaaagaggtacaacaatataaaaaaaagtaggatagagataaaaatcggctattattgaagaactttttagtttttagccatctccattgacagaaacgagaagattttttcaaaaagaataaaccacaagtgatatgacaactgtcaattcagttgagaaccattttctatttgagaaccatctcattcacggtatattaaaagaatacgactatgaaaaatcaaatgttagagaagtagatcagcgaaatataaaaatgagatagtaagcaggtcgtgggcatataaataagcgtccttctgttttctttgtcatcattaattcattaccctcaacaatggaaccaaccactccctattcccatgaggatgacgttgactccacccacagctcgaattctactgcgagtgacggtaatatagagctaatatataatttacgttgtgatcctgtgtgatgaaagagtttcattttattcctgatttagtagcactgtatattttagagttacgtacgttaacatttgtttactgatttgtgcatttatatatgttcatgaaaacagaaataaaagccaaaagatgatttactgcgagatctaagctcgaatgttgtgtagattaaattttgaattaatatcaaaaaaatgttggatgcattttataaaaaaagtaaacagtttttcgtgtcagagagaatagttggatgaatatcagaaatcatctcttcttgaataatcaggatcaagaaaagtgttaaaagacaacatttgtatttcgttgagtgcaatatttgttgtattgtacgtaggaaccgagagagaagagaataacaataatgaatctcaagaagagacgagaacgtcgagaagtcccaatgaggctttggatgagataaggaggcaacagacgcataacctctactgtcctaaatgtaaaactaacatcaccaaaagcgctgaactcgttgtaaagaatcaagagaccgattcgtacaaaacaaaggcttacgtactttgggttcccctcgttatctcgcccttcgagttccctacccttcatctcttattgtcttttctcacaggtaaaccatttacatatacatactgcttttgtgtatatgccagacactatttatttcttctttttaaatgcttaagtggttcaacactctttcttgatctatatgtcgaagacactttgatttctttaatgtgttgattgattcttgatcaacatgaccaatcccatcattgcttacaggactatggaagaaactaaagacacttgtcccaaactgtttgtcacggctcagtcccaactttctgcctctgcggtacctactggttgcggttctactattgctatcagtcattgtcctgtggtcctctgatcctcctctgccaccaccaccgccaccttatccttcaccattgccaccgcctccttcgccttcaccaacaccagggccggattctcctttgccatcgccagggccggattctcctttgccactgccaggaccgcctccttcaccttcgccaacgccagggcctgattctcctttaccatcgccagggccggattctcctttgccactgccaggaccgcctccttcatcttcgccgacgccagggccggattctcctttgccatcgccagggccgcctccttcaccttcgccaacgccagggccggattctcctttgccatcgccagggccggattctcctttgccatcgccagggccggatcctcctttgccatcgccagggccgcatctatatgaaaaaaatcgctggctcatacatttcccgagtatcaagtacctttctgtattctcgctattgttccttgccattctgactctcccttgggcttccatttcccccatcttcaataaccttattgcagcaattaaaacatgtaggggaattctgaatccttttcttcccttttccatttgccataacattaccaaagacttatattaacactatatatatattgtagggagcaaaagagttattccacaaacttttataaaacctcaaccccgtcttagtagtacagataaagctctaggtattttcacatgtaaaattactataacaggagatcatcatctttgtcatctttccctgaccctctttctcatttatttgcttaagatgacaaaaacacatctaggagcgaagaaaccatcacgcctaatactcagctggataacaaaggtatcgcactttttccctcaactctctgattctgtgttggaatgatgacttcaacctttgtttcccatcttgtttccgcctcgtgcacctgatgaaccaatccgcattcctatttcagtgccacttccagatgttttgtggaaatccaatgtggatccgacccgggaacctgatgttagtgataaaccaatcgatgaccctagtccagtgttacttacagaggatcatgataaaccaatcagcattcctatttcagtgccaaatccaaaggaaatgtggaaatatatcgtggttctagttcaaaaccacttaccaatgttgaaatatatcgtggttctagttcaaaaccacttaccaagagagctagacatcttgaagagtattgtgtacggaggtcttatcgagtccatcacaagcctcggtgtcgtatcctccgctgtcgcttccggagcttcaactcgtaagtacacttaaacacggcattgagtttcttcatacatttcaattaaaactaatataatcttacttgcagtcaacgttatctctttggggctagcgagtctatccagtggccttattattatctgtaacaacgtaagtcgttttgtttcctttcttttttttgcctgcaaaaacttttaagacgttagtaagataatttactaaacagagcacatactctgttttcccttgagaaaccgaacatctaactttgttttctcatgcgtctctaaacacttatgagtaaaaaccttttcattcgattcacacttacaaaatagaatatattttggcagctctttcgactaaaaacgaatcaaccacgatctcaaagtactaacactgatcatatgacgagtgaggaagtagacgatccgtaccaaacactgctgggaaacaaaaggaacttcacgctccactgcgtcgtcgttgtgctttccttcttcttcttcggtgtgatacctcctctctgctacgccttctcttacagaataaccgacaagggacactacaaagctgcggttgttcttgctgcatctctggtctgcgtcatctctctctcctttgccaaagcctacgctttccgcatgcaaaaactcaggaccatggctgaatacaccggaatggcgtttggggcatctgccttttcattcattgccagccgaatcgtcagtgatatctttgaaaagtttggctttcatgagcttgcagctgagtaccgaaaagactgatttcaagattctgcaagtatgtttaagataaacaacaaagctaccaaaagagttgttctttagctgcatggtcttaatttgttttgtcctgtttccatgtaagcaaaaagattcgattttttaatcaagatttatcagtttgatcttaacttacttcatttatataaataaataaaaagtcaagttagttgggattatattaaagaacgtggaactcgtgaaattaaaatattcagatcaagagagtaaccataaattgtgatagcatggttctgcatctcaactttgcttgtctccgatggatcccaccatgaatccaactccaactccaagctccgccggcaacagtgtctgcacagatgaattgaccaaccttcccccggaggactcgccactcgacagcgagaaggatgatagcgttgacttcagccaggagcaaggtctgagaattatatgtacatctgattagttagttatacacacttatagtgcattgatatatgattagaaagtatatgaagtattactactgttcccatctttttcaaaatccaaattttgacccataggatcggagtcaaatgaagctattgacactgagaatggttcaagatccgtagacaagaaccaatactctgaaactgaagttgtagttagagcaaaagatttacagacagaacctgattcactggatgatgatgtggagattgtgatcaaaaaccaacataagtattacatatactgcccttgctgtggtgaagatatcaccaaaacagtcaagctcgtgaagatatcagatcccaaacacacaaaagaccatgacaaagctgttgacagtgacactgagaatggttcaaaatccaaagacaagaacacaaaggttccatcatggttctctgattttattcagccgctgttttcttctgaagacagaggtaccctttcttcctcttctttcgatattgttagatggacagttgtgattgagcttgatttcttggcaattccaggaaagaaaggggttgttgattcagagttactaggaacttacgaagatctcggtatcattggtgaggaaccgagcatagatgtcagtaacgagaaagacagaccgagttttccaaagtggtacctcgatgtttttgcttggttattcctctgtattattattgctctttctgtcctttcgacttctccaccgcctttcattcaaccacatctgcaattaccatctatgcctacattgaggatgccttctgcttctgtacttttgttacttcccacatctgcggtgttgcttctcttcattatttcaatgaggtcccgtttcactccgagatatcacaaggagaaaggtacatgctttttctttcccttcttttgtctttgtcacttcaatctactcgttcgacactttgattgacgattttcgaaactatgccaggcgaggtcgttcccaagtctactgattccaagtctcacgatgaccaagctgcaaatactgatcaagattttgacaagaaaacaggtttgttctgaattctgaatctgagatgaatccttattcagttgctacttaacaaagattcttgattatgctagacaacaaaagaaatcgcctaactcctatatacccttcatcactagagaaaccttccaagcaaactgtcaataaggaaactcaaaatcacgataaagaagctgcagatcctgaccaagatgtagacaaggaaacaggtctcttttgaattctgatttttgagatgaatcctaattaagtttggttcttaacaaaaattcttgaatatactagagaaccaaaaaagtcacctaactccgatatatccttcaccactggagcaaccttccaagcaaattatcaataaggaaactcaaacagaacctatgttgccacctaatgctcaatcagagatcccaaatagtgttgaaccacgcaaaggcggtaataaagtagaaattctgaaaagtattgtgtatggaggtcttacagaatccatcacaagcctatgcacggtaacatctgcggcagcttctggtgcttcaactcgtaagtgatcccattctctctgaggcatttcgtcgaacactttgaacgcctaaaacattgctaatgtcttttgcttgtaattcagtgaacgttttagccttgggagttgccaatttgtcaagcggtcttcttctgactgttcacagcgtaagtgcactttctcatctgttgtatgtaactctcaaagaattcaataaaggatccatttttctgcagctccaagaactaataaacgagaaacccagaaaacaaaccaacactgatgattctccagaagaaggagaaggagaagaagatcgatacgaggaagtactcgggagaagagagtattcgaggattcacagagtgatcgcaatctcttctttcgtcatcttcggattgatcccacctttagtatacggtttctcgtttcgaaaaaagatggaaaagagacaagagtacaaggttttagctgtttacgcagtgtctctactctgcatcgtcttgctctcaatagcgaaagcttacgtgtcgaagaaacgcgattatgtcaagactctgtttcggtacacgacgacggcgacgacggcgtcgggattctctcaatttgtgggatacttggtgagtcaatggcttgagaaaagcgggttttatgatgattctccagaaactcaacgagtttgaaacgagttcttgttcgtcttctcttcacttcccctgttcttttcgtactctttacgtggcccaatttattttccttaaaagtggtagaattgtttgattttgaccccaagaaaaaaaactttttttgtgtgctagacttggctctctttcaagttagttttggatcaaacacttgttgttgctgagaaggttccgtgaacaagaattctgtaacatgttctagtgccaaaaataaccagttcataaggttttatagtgcatgttaattaataaatgttgttaccttatgtgtcttttaaacaatggcgattacaaacaattagacatatgcatggaaatgcaaatagcactgcgtgcgaggagaaaattagggtttatcaattagattcaattggtcggacgcctactaaaaatgtggaacttaaagattggtggtggtggcaaatacagtttcatagatatggaaaacaactgatacacgttctgagataagcaaattttgtgactaaacaagttgtataatatatggagattgaacttatgttcaccttgataccaaaaaaagaaagaaaaacttatgttcaccaaaatacataatgtatcatcagcaaaaggggaaaaaattacggtgactgaatgatgaagaatcaaagaaaataagaaaaagttgatgaaaaatggcatcacatgaaaaacgcttggttaattatttcattttaatcatggatcaaattcagggatgagtgaaaacataaacaagcaaaaattattcagcacaaaaaaattcaactacattaagcaaatgatgagagtttttggcactttgtgccattccagaagctacagtttaatatctaatttgaactaaagtttaaccaacgtgtactattttcatcttgttgattctttctactcgtatgggaccatctaatgcgaatacctaacaattattatatatgatataaaattataaatccatgtgaactcaaggttacgttcacattcatgactcatcatattgagtgagtcgatcatataattaaattcaacctacattcttacacgattctaatatagagttaagattttaattaaaaatgatgacacaaattagtttgaacacaacataagcatgttagtaacgtgcttttggggttatatatcattattttaggtggtattattgatagaatggttaagattttaggaatcatggggatttgggcaaatattgtgtaactaagtatctatgtgtcacatttcttatttcctttcaatttctcctgataaacgtaggaaaacgaatatatactaatggtgatggtgattgatcacaaccatatcatcgagaaacttcacgttcaaacgtaaaagacgagaccattatcgaaacaaactagtatgaagaagttttttttgttaatgaagaaggttttttttgtgtgtgaagaagttatatatctgaatgcaaattataatgcaaggaatgtgtatctagccaattttgttgataaaagattagccataactgaattaaatatggattttttttttttcgaaaaatgaaatatggatgttattatgttagcatgattaagttaataatgttgacatgttgtaatggtactatgtcagcaaacgtgttgcatgaaaaatttatacggaatatttctatcgagtattaatttcaagatgcgactttcttattagaatattagtatattaaaaacaactagtggtggataaacaaacattattgtaagatgtgttgttaattcttaatttgagtactattattgtcttttattaatatttttgtcaactctatgtgtttgatgtagataagaattctttggccgtattgattattttccacgtttgaggcatcgatgtagttgggacgtgatcgtgaaatgaatgcagtcagtgtctccaatctgtcatccatgtgccaataaatccctgaaaagaaggtgacaaaatcttcaactaatttgtttgttaatttttactactaagtatacaattttactagttacaatatactatttcccataatgaataatcagttgtaaatttgtaataggaaaatatagtaggtaagcatttagatggtaaatttaaataaataatttggttaagaacaatactgataaaataaactatcaaatactaaacaagttatttaaaataagctaagttattttgttgtgtattttcgaaaagtctatatatctaaaggtgtcaaataaaagtcacataatgtttcgaaaatcccataatagtaggtggtatttttagaaataatgaaatttgggaggaaaaaatcactaatactacttactttgtcaactatatgtagtaaaggtaaatattaacaaaattacaaaagaaaacaaaaagtcctacagttttagtaactaactaacaaagagctttaaacacgtgaaaagtttttgcataaaactagtactagtatattagaactaggagtagtgctcaatcaacggccaagtcaaaacaaacaaatcaccatcaataatcatataattaataagcagaatcatcatttatgtatttgataatgttcaagtgaggaagaagaaggagacaaagacgaccccaacataatatctatcaccttctctatagatagttagatctcagaatctctccttttttgtttgctttacccttatttggccattcctgtcttccactttgtcatcttttccctttctgatgggatccgccgccgaactcacggagcccaccaccgggaccgagaagcttcaccagccaatagaagttgaagaagatgacgaacaaattgttgatttggagaggaaaacattccgtcatggaaagggacacgatactagtgtggacagtagtacaatcaccaacaccagctcgtcgtcgtcttctagcttttccggtgatggtggaacggaagagacccccgatttccacagcaacggcgatggagaacataccgatttagtaaatttggaggtcccggagctagaaactgaaatcgtatttcaccaagagcatgacgacgggaagaattgcatcgtcttcttcgacggagaacaaggttagtttactaaatctccgattatggatcacttgaagaaattccaagcttgttggagctgagtctatcgtctttttgtttccttatcaagtagagtaattagcctaattgcctaaagaaggttttggattatttgtgattttagtcttgtaatcctgaaattggaagcctgagtctgaatttttagtgtaggatggtagattttctgataaaaacgtttcttttggtgaagtcgtagtcatgttttgttgtttgtatatgaaggaatttggaaatgtcgccactgcgattggacctacaaagagggatctttgttatgcaaaggtcagtccagtgttaggcttacttggaccaacgaactttttagctgcaaaattcattagattagttgtctttttttactggaaatttgttgtctatttaaccattgggtgttttttggttggagctgtcatcatatgtagttgagtttctggttaattcttgtttgatgttcttctgttaggttctgagtcagctggtgccatacctgatgctcatgaggagtctcaaactgctgacttgaatggggagcaaacgcagttagaacctgaaaacggttcaacttctgaggataacgaaagatctcgtgaaattgaagaagtactagatggtgatgtctctaaagacttggatgctgttgatccactcgctggtgaggtgatagaggaggaggtggacttcgaagatgttgaatatcatgatgtggagaatatgatggataagcaagagacacatgatttgtactgtccaaactgcgattcttgcatcaccaaaaaggttatcctcaaaagaaggaaacggaagatccgtcgtcatgagctgggagattcaaagcggcctcatttgactgagcctctttttcattcggaagacaatttgccatctctagatggcggtgaaaactctgcaaatgagtcatttgtcttcaagtgcttgtcatgctttaccatatttattcccaaaggtacactagaccgtaaaagttaccttgatatatcaaaacttatttcagatgccatccctttttgtatccaaagcatgctttctttttctggaaaacaaaatcaggggtgagttcaaagccgattcctccccgtcaaggagttgaggggttaaagattcagccaaaccctcaagtggaagctacaggcgattccaattggttcagttcaatatttggcctcaacaaaaaggaatcagctattcagcaaggtattgtttcgttccttttccagtatcatcaatccatttatgatttaggcattccctgcctttagtactgcaaaacggtgattcccgtctgctaaacttcagtggctacttcggtgtctaggagaattaaatttgcaatgaatctccttttgtactcactatgatgctgaaggaggtttgtaacatttcagcattagcattgaatgtatttattttgtgttgtcaaggtggggcatcatctagtgtcttggaagctaatccgccaccacgtgagtccattgtcccagtagttaatccatcgcgtggtaacctaagtcctatgcgaaaggatacgacaggctcagccgttgttcagcctgatgcagccacttcgattcaaggtacatataagcaatgtcactcttagaaagtggaacccatgttcgtgtgttgtagtttgagcttttgacgttgacaagcaactttaataaaaataaaaaacgtgatagccaatacttcttctcttatttagcttttgcgtctctcgtttgacttttaaagactccagcactattttcttaatatgatggcagttgcaaaatcaaacgatacaagcgaaattgtaaacaatggagctattgttggagacgggcaaaagtttctggctcctatggtggaggagcaaacacagcaaaagattgacaatgatgattctagtacagcagacgggaatcacacgtcagacaaaggacgtctctccccaattcaaccatctcatggcatgagtatactaaacacagtgactaacggacccgacggattgaaagtagaaactacaattcatgaagaaggtgcccctcttctgtttgaaggaaaagacactcctgacacaagcacggcagattttggtctgaccaaagtaacaggtaatcttaattctggttataatgatgcgaggaaatcatattcatagcttcagtgccaaatacgtagaataaaaccggtttctgtctctcctttgtttgaagattaacttcttaccgttctgtctagtaattcctattcataccttgcaaactttccgcttctgtttaggtgtgatggacacaggtgacagaggagttattaccggtccagcaaatcctgaaattgatatttcagcagggaatttgctggaagaagggtctctaagggaaccgttaatgagacgagttgttgttcaaggacgtaaactggaaatcttgaaaagcattgtctacggaggtctactagaagccatcacaagccttggtgttatttcatctgccgctggttctggtgcttcaatgtgtaagtaccgcttacccctagctatccattttcatttgtaaaacacaaaacacttttttcttgcttgaaaatctaaatcttgcttgaaaatctcaacacatgtttgtattgttgtggttgcagtgaatattctggtcttggggcttgcaaacttgcttggcgggcttattcttattattcataatgtgagtgatcaataaaacctttgtaatgaacttggtaatgaaccatgtaactggcaaattcaagaaacttacagagatacttcttctgcagctccaagaacttagagaggaggaacccataagaacaacaacagaagataaccagactaacggtagagaagaagaagaaggtcggtataagcgactccttggacgaagagaaaatttcacacttcacgcaacagtcgcaatcttatccttcataatcaccggaatactccctcctgtagtctactatttctcattcagtgaaaaacacaacaaagactacaaagttgcttcagttttcggggcatctctattctgcatcgtcttgctcgccatagccaaagctcatgtgaggtacccgagaggcagctacctgaagagcattctgtactacgggtcaattgctgtatcggtgtcggggatttcttatgtggttggtaactttctggaacagttgcttgagaagcatggatggtctgatggatcggaaacacctgtgggacagatgatgctttcatcacttatgggaagaaaagccggctttggatactcatcatcgtactgaaactgaatcttgcctggagaatgatccaaactgaaacttgctgcttttctcttttactctgcttttgtgagctctcgttccaaatctttgttgtcggcaaatctttgttgtgacttgtgagtgtagaagaaagtcgtttccacttgtagaataaactaaaataagcataacataataatgatggaagatctgtgccttttaataagtttaaatcatttttaaaaaatgacaaaaagaaggttctaccgagaattgaactcgggttactggattcagagtccaatgtcctaaccgctagaccatagaaccatttgatgacagtcctgatataaactagtatatactaaatattatatgcttgccgtaaaagtacggttacgtacgtagcgggtttgaaccaatcactaatggtaatagccaatcccaattggcagataatgttataaccgtcagattcaaattcgaattaaagggagccttggcatctgaacggttcagatttgatctttcttcttttctctctctctctctctctctctctctcagtttcagagatcaaaagagaccaacgaagaaaaaagcaccgcttttgcagaatcggtgacgatagaaagagaaagacagagagagagggagggttagagagtcaggggctatttgattcccctggaaaatttcagatatttgtttcttcatcttctttccttatttctctctttctcgtttttaccagatttgtcttacgaatcaattctcaaagatacccaaaagtggtagggaagcaaagtactgttttattttgcttttgattctatcaaaatcagcggtgaaagaaaggaattttttttattatcagagaaagagagattcttgataatcgaatagacctagatttttttttgaatttagggcttttttgatttttgagaaattgattgtggtaatggagacagatagtatggagtgcgtctcatctacgggtaatgagatccatcagaatggtaatggccaccaatcttaccaattctcttcgacgaagactcacggcggagccgctgctgccgccgtcgttaccaatattgttggcccaacagcaactgctccggccactagcgtgtatgagcttctggagtgccctgtctgtacctattctatgtatcctcctatccatcaggtgaatctccgatgctcttttggttgtttggttctcaattgattcctaatgatacgttttagctttatgtgtttgtgttcttctctgcctatatgttgtgtagcgtttaatggggatatagattatataatgtggttgttcataggttttgatgttgcttgtatcctagaattgagccaggggaagtaattgatctgaaaagtgtgtctcttttttgttattgttgttgttgcagtgtcataatggacatacattgtgctcgacctgtaaagtgagggttcataacaggtgtcccacatgtagacaagaacttggagatattagatgtttagctcttgagaaagtagccgagtcgcttgagctgccttgcaagttttacaatctgggatgtcctgagatctttccttactacagcaaactgaagcacgagtctctctgtaacttcagaccttacagttgtccttatgctggttcggagtgtggtatcgtaggggacatcccttttcttgtagcccatctcagggatgatcataaagttgacatgcacgctggttccacttttaaccaccgctatgtcaaatccaatccgcgtgaagtagagaacgctacttggatgctaaccgtgagcatatccttctttgtctaggaaaacatgattctcttcaatgttttcggtaactaaactgactgtttcttatgtgggttcaggtattccattgctttgggcagtacttctgcctccatttcgaagcgttccagcttgggatgggtccagtatacatggcattcctgagattcatgggggacgaggaagatgcacggagctacagctacagcttagaagtgggaggcagtgggaggaagctaacatgggaaggaaccccaagaagcatcagagatagccacaggaaagtaagagacagcaacgacggtctcatcatccaaagaaacatggctctctttttctccggtggagacaggaaagagcttaaacttagagtcactggtaaaatctggaaagagcaacacagtccagattctggactttccataccaaacctatcttcttcctgatcattcttttatctttttgttttttctctctttgagaaggaatgttgtatgatgattcgtttgcactcttcttctttgtctgtatctaaaacatatcatgaatgaatgtttcatcttatagtctcatattttggcagatgcattacaatttagatacatggagataggagatttgatcaagtgaaacaaaaaaaaaactaagtgattccgtggtaacaagtaacaacttgttcaaacgcaactaaaatgtgtttatgaaaaaatggaggtgcggggaatcgaaccccgtgcctctcgcatgcgaagcgagcgctctaccatatgagctacaccccctgtttgatttctgataacattaaactaattctattttttgctaacactgtgattaccataatacaatatccaaatgtatagtgtgagacaagaccatatatgtaaaatatttagtctatgttaaacaagttgcccaatcgacaaattattaggaggattgttgatgtatatatgcatttatcttaaaaataaaatctaccaatattttcaaaagtgttcaaacattaaattgatatcaaattaataaatagaaaagataaggttaaatatgaagttattcaattcatataagttttaaagattatgtaagattttctcttaacaagatttcaacaaatctttttaaaagatatacgagtatgaaaacaaatcctaagcttttttattttccaacaaacaaattcttgagctttaaaacaatttaaatgtcctaaattgtataatctaatctaatgttagtgaattgcaattattcaaattattaacttaatagataaataggaaaaaaactaaataaggaaagttaggaattgaggaaaaggaaaaatcttagaaattgaattcgagagggaattaaaggaaaaaggcctaatacaaattgaaaagggtttttaacttttaagttctgtttcttctagaactttactttttagccttcgtggctttccctataaatttcccaatctttggccatcggacgatcaaagaaactcattctgatttttaatctctgacgagcaaagaaccctacagctaaaagattaaaccaatggcgattatctctgagatggaggaggcgagaccctcgatggtgcctttcaccgcaagttttgatccttcaaacccaatagcgtttttggagaaagttcttgatgttatcgggaaagagagcaattttctgaagaaagacacggctgagaaggagatcgtggctgctgttatggctgcgaagcagaggttgagggaagcggagaagaagaagttggagaaggagagtgttaagtccatggaggttgagaagccaaagaaagatagcttgaagcccacggagctggagaagccgaaggaggagagcttgatggcgactgatcccatggagattgagaagcctaaagaggagaaagaatcgggtcccatcggtaagtcctttgtaaacctttcttgtgtctggaaactggtatgtcttgttaggttaaaatttgtttagggtatgtttccttagttattttattatgctatgatgagttttggaatttgattcttgtgttaaagactcaacaactttagtctcttttattgcaaaactaacttgatgtctctgttttgtgcagttcctaacaaaggcaatgggcttgattttgagaaatactcatggggacagaatctccaagaggtcacaattaacattccaatgccggaaggcactaaatcaaggtctgttacctgtgaaatcaagaagaaccgtctcaaagttggtctcaaagggcaagacctaatcgtcgatggagaattcttcaattctgtcaagcctgacgactgcttctggaatatcgaggatcaaaagatgatatcggtgctcttgacaaagcaagaccagatggagtggtggaagtattgtgtgaagggagaacctgagatagacactcagaaagttgaaccagagaccagcaaacttggtgatctcgaccctgaaactcgcgcatccgttgagaagatgatggtaagttatatcggtttctttatcttgatcatgatgatttttttgtgttagattttattttgcaagaattgtgtttgtgacacgttttctttgttttctttttgtcttttacagtttgatcaaaggcagaagcagatgggactaccaaggagtgatgagatagagaagaaagatatgctcaagaagttcatggctcagaatcctgggatggacttctctaatgcaaagtttaactgatgatctttatccaactcttcttcgtttaaggccctgtttgtttgtccatccacatgatccatccaaatggagatgaaaaatgatgtttgtttttgacaatttaacaagcatttggatggatcatctggatgatacatctgaatgagtatctaaatttaggcaaatttatgaaactcatttggatgaatttgattaaaccatttggatggagatgtttcatccaaaaataacaaaaaactaatataccctcatttatagtcataatttaaataattttattttctatagatttctcaaaaaatcatgaaatcacgtattattcttttatgtcaaaatcgtaaaatcgtgaaattgcgttttttggccaaaaatcgcaaaatcataatttttgatgtaaaattatagaaatcgctattccacctaaaatcataaattatatttacgctgaaaccactaaattatattttcttgccaaaatgacaatattatgttttcccgccaaaactgcaaaatcatgttttcctgccaaaattgcaaaatcatttttcccgcaaaatcatattttcccgccaaaaccgtaaaatcgtattttcccgccaaaaccgtaaaatcatattttcccgccaatatgtttggtattgatagtgggtaataatgttgaatatttgtcatttgttaaaatgaaaacatgggtattttagttatttttatctaaatgaaaatgtgaatgaactacaaaatgatcaaacaaataaagatccatttaaatgcatcatttagattaaattacaaataacgaaacaaacatcattcaaatgtatcattcaaatgaatcatgtaagtggatcatttgaatgaaaatgataaatgatgaaacaaacagggcctaagccaattttgtgttctaatataatcttgttatgtcttcaagattacaatcctgcccttttggtttatttcaagacagttgttgataagttaaatatctacttccttaagaaaacttcatctgtgttttttttgcttattgatctgttcatgagtcatgactatgaatatagtttcgttttctaaccctttcgattcctagctgatttctctttaatttgtttttgtttacttatgtattcatatcaaaagcatgcacattattattattatatttttgcgcattatttatgtgagaatgaaaacttattgtagaatctccggtgaggtttagctctggtgggtggaatattcttgttgtggtacggacttatgtttttagtgtaagttagatttgatcaaaactggtcacatggtccttgtccatactccattgttctcaatgattcataagagacaacaacagtagacgacgacacgttttcttcttttatgtgttatgctttagttagttagatccatgcatctacaacaataccttccaaaattattgcagctataatagaaatatcaaaacgtggatgagaatatttgcactaagcttttcagaattctactacactaaaccatggaaaattagtttctcctacatgctaaattcatctaaagtattttctcgagtccatccacaagagtattcgagcttggaagcaagagttaaaagaggttattgtggttgtacaaagtgggacacctttcctgattggcgccgccatgccccttggcaatgaacaatcaataaaggtatcgcaaaagccaaaggttcaaattttcaagctacacttctgagattaatggcagacaaaaaatatatttatagcttagatagttatacgttatatatagcattgtatatagacgtagccaatttgataaaaaccaatgcattcatgacccaacatattgggactcaagactatataaagccaaatacaaaacaaaacaaaacaaaaagaagtccacttgcgtataaaatatattcaatttcaataaatataaatgcaaacacaaacttagatgtataaactatagccgaagtgaaaatattcggcaactttagcaaatgaacaatttcttacagaaaataaatggtcatcatcaaatttggaccacccatggatttatatgtcaattttcatttccatattcatgtaacaacactaccgattgttggtccccaactttgtgttatttcaaattactttttatacgtacgtgtcacaagtaactatgagtaaatccaaaacaaaaaagttgagacaagaacataagaatatataattcgatgaaactgaagagttaaacataagaaagaaaagcataagatcatacgaataaattttgagaatcataatttgatatatatactcaaggaccatctgtatttattcacttttgggtattatgttaagttctcggtaatcaaatacaaaatttcctctcacgcacgtacacttgtagtttcaattcccactgatacaaaagcttccctcaaagatggagtaaggaaattgaagtaaaacaaacaatttggactaatgaaattttataaaacgattcaagttggaaaatacaaggaattaacaaaac

SEQ ID NO: 639 - DNA, 83693 bp, Arabidopsis thaliana
cttccctcaaagatggagtaaggaaattgaagtaaaacaaacaatttggactaatgaaattttataaaacgattcaagttggaaaatacaaggaattaacaaaacgtgttttggacgtcaaaatttagacaagagtagtcaagaatccaactatggaactaaaccatcctcactgttaaatctagactctagtgattagcattcaacaaaaacaaattatacttttcgtacggaacatattctgaaactattcacatgtcagttttgtcatttcctcaaaactcatattcattttttttttaaatggacatcacgggacctgagttcctggccataaaggctaaaaagcagatccaagaattgattgattatatgaatttagttacaaagtacaaccagattgtattctatgaacatattaattgtttccactattcatggattcatgatagagaacaatatcactcagaactagttaatgtcgcgatttacaaaaatcccacagcaccataacctcgcaatcgcatgacgtaatggaaaatgtgagagagagtcacaagaacataggacctacactaaacatgtgtagtgtctacactctacagtcacctactatacaagttgctaaatactactacgtacgacttgtttagttagaactgcaaaaaattaaacttgtttgtcctctaatcccaacagattttgtttttatatactgattaaccactgctttgttacaacaacttacaacttgaaaggaacgttacatgaaataactcttctcattcatgaatcatcttctctacataagaaaaagttgtgcataagaaatatctacactgaaaaaatggcagtgggggttacatttttgatttctctaattctttatttacatttatttctattttcatgttaaacatttatttcaatgccaaaataataaagaaagtaaaatctataaatgggattcagtgcaccaataattcttacacataaaaaaatatcagtatcaggcctctcaacatcacaatagggcaagaggaggggccaaagtacacaactttctcctcagggtatgctccaaattcccaacttggcctctctttttcatcttttgggtttttatgttcactcttctctgcttcattcctctttctacttccaggaaataaaaacttctaatcaaagagcaagagattaagaaatgtatgcagaaactagcttagctttccgattcatgcagagttcttcttctccagagattcaccaatttgaagacctctttaaatcctacaagctctctgatgaaatggtttgtctttttgacttcacttcctctttttttgtcactgcatttgatttttttgattttgggtttcttgtctctgcttgacctttgatgaaattaagttgattgatgaagacaattggagtgtgaaggagatggaaaacactaattagtggatattagtggcaaagttttgtgctttaagtggttttcttgagaaaatttgtggtaactggaaatttgattcgatctatttgctgagctcacatctgttttggcttttaaaaattgggtctttctgggtagatgaaaagacggaatcttcttctgctgatgtttgatagaacaaaaaaaaaactcaactttatttttggttttgagaaaaagaagacctttttatatgtgttgtgattatgggatcatgggagtggcccttttctctttatagaagctgaacttagaacttaataagagtgtatcatacacgattgacaacaaacttttgtgtttatagactatcagattccgtgttctttgagaattgtgtttttcttttttcagttattcttttgctctgcttggggtttgtcgattcatagtgtcataatcttactttcattctccactatgactgtaagaaagaataaaaattccctttcgttttaccttttttgaacgaattcattttaaagagatctgtgtgtgtttgtgcataaaaccaaagaaactcattgtgtcttagtcaagttttgagttttgatcttgtggtttgtggttttggttgtctcttgttatgttttgctcatttttcttataattgtgatgcagaacaatcttgttgaggcaagtgagtatgattttggagaagagagtgacctattcaaagcccctgagccgattattgaagaaccaatgttagctgttgatcccctctctcaagagcttgttgaactcggtgatctcgggtcgttgcagagtgaccaacagcttatagacaaggctttctacgactgtgagcaggacctcctggtgaaatcagccatggagtctccgctctccgaggtactagacatcaagaacatctctttagtggcaaaaatggacaacgatgtgaagagtacgagtgtagtcgtctctgatgtcccaattccgaagagtgtgagctcgggaaacttgagctcaatggatatggtcgagcacaaggatgcggtgattcagggattccctgatttccctccagtggattatgggatgagaagagccttcagtgaaagcgatatacaggttagaactgaaattattgatattactcttgtgatcattgaactcaacctatacaagggtttgcaagaatttagactgtgctcattcttgtcacatcatcgatatttcagagaaagttgtgacatttcccaaactcaaatgaatatatatagatatgatgttggcaaaagttctcatgtgtatgttcatcacttgtgatctttttggtctatgacagacactggggactggaaatacgggtcttgttcagtctcagttggatcgaataatcataagttgcacctctgaggaccgccgtgagaagctttctcgatacaggaacaagaagagcaagcgaaatttcgggcgtaaaatcaaggtaaagacccgaaaaaacagtttatataacactaaactctactctttcttctcaaacccgctttgttggaaactgagatctggtttgtttcggtatgtaccgtatggttgcagtatgcttgtaggaaggcacttgcagacagtcaaccgaggatccgaggaaggtttgcaaaaacagaggagatgcagaaatgatgaggactagttaggtctgatgcggtgttaagaatataatcccacccacctctcgttttgtatataagggggtttgtctgaataagcctagtaaggagtaaggattaggaagaaaaaacaagttgtagtagtcagtcactcaagtaatgatgcttatatatgttagatcttgtgaagttatgtatctctaaaagtttatatatagaagctgtttaatattcctctctaatggtttgacttcaccgtatatattatcagtattcttagttttgcatcagttgacataagtagcttttgacttttgatgaatgactgtacatggggatcacctttggaaaacatgaaaaatgaaactttagccaaaatctgatttagtatggtcttagttccacacatactttcccatttgtatatggttgtggatgcaacagacctgttgaccatgttgagatatatttgtaattaattgaaaagttctaacatatcagaacacgaagctgaactttttcaaaattctaggttttgcaatcctcctcaaataatttggtgaactttattaatgctttgcgatgaagaatcgatggtgacctgtatcattctttgcgagtatgttttggacttttgggagccctaaccttaaattaccatttccaatgagaaaagcttaaaccttgtttaagtaaatccaacggaactagtaatgtttactgataaataaatcaacccagagacaaacccctaacgaacgtgattggtggtctgtctccttgttaaattttttgtttgtagttgagaaaatcacagagcttctcggttagttctaaaccggaaaaccccagaaagaaattgtattattacgtaaatacccttagaagaattgtgaaaaaattggtgggaaacttttcaataatatttttgtttccatcttgtagctgcctctttccatcaccggtgcatatagaaacagagaaacaaatatttaaaattttacatctacaaagagacgacaactctcctgtgtaacaatgtaagaagagcgttttcatgggttgttgttatttcttctaatgttgtagtgactagttgttgtaatcataacgaaaaacaaacgtaagaagtacactgccgtagccgtaccatgtaagttccattacaagcttccatagattttcaaacctcattaacaaaacatgtatctgaattttcatatcaaattaagaagagaaacaattaaattacaagaagagacacacgatctttgaattggttccgagaagagaaagaaaacgaggaagaagaagaaaaagcgtgtgatgcgcaggttagcttaatcacagtaatgtgcacattcacgctattcagaaggtgacgccgatccaaacgacccacttcttctgcgtcttctctctcttcacctctctgtctcgcctttctctctctaaaagaaaaaaatttcttacccagaacaaataaaatttgccgaaattttcagtctttcgatttaaaacaattccttgacaacatttcttccggttttatcatccaaatcataagaaaggacgcatttttatttataaaaattgggtcttttttaatctcttctggaattttaagagagagagatatagagcgagagaagttaggaacagatctctttctctttctctttcactttctctttcgctcattcgtgccaaaagtctcttcttccatcaaattttgtagctttccttgtttgatagaacgggtacgcgattttcagttctgggtcagaggaatacggaggacttctcctctccggagcatcagaaattgaggtctagattagggtttgtgagaaaattcgagattttggttgttgattcttaattggaacagtgatgctctgagattgcttttctgaaatttgaagaagaatgattatcaaacggaaatttaaaacccagataccgagtttggaacggtgcaaactcggtaatgagtcaaggaagaagaagagaaagttgaacttgggaggaggtggttactactatcctctcaatcttctcggagaaatcgccgccgggattgttccaggtaatggacgcaatggattctctgcttcctggtgcactgaagttacaaaacctgttgaggtggaagagtcattgtctaagagaagatctgattccggtactgttagagattctcctccggcggaagtctcacgtccaccgcttgttcggacatctaggggaagaattcaggtgcttccttctcgattcaatgattcggtgcttgataattggaggaaggatagtaaaagtgattgtgatttggaggaagaagaaatagaatgcaggaatgagaaagttgttagttttcgggttcctaaagctactaatttgaaaagcaaggaacttgataggaagagtaagtatagtgcattgtgtaaagaagaaaggtttcacgagcaacataatgatgaggctcgtgctcgtgttgatgagaagcttccgaataaaaagggtacttttgggccagagaacttctattcaggtgacttggtttgggcaaagtctgggagaaatgagccgttttggccggctattgttatcgatccaatgacacaagcacccgagcttgttttgcgttcttgtatacccgatgcagcctgtgttgtgttctttggtcactctgggaacgagaatgaaagggtacgaagagactaatggctttccaaatatggaatctggccttcttttaagtattctatttctgactgttgtttaatgtaagcaggactatgcatgggtgaggagagggatgatcttcccttttgtggactatgttgccaggtgggtctctttatataatcaaaagaaaaggtcttaaatgtggattagtgcttaattagctacttattcaggttccaggaacagcctgaactgcaagggtgcaagcctgggaattttcagatggcattggaggaagcatttttggcagatcagggattcacggagaagttgatgcatgatattcacttggctgctgggaactcgacttttgacgattctttctacagatggattcaagaaactgcggtctcaaatcaggagctcaataacaatgctccaagacaggcaagtgtctctatgattttggtccatttttatatgacttttttttcttatatctttttatgtaaatctcctccaatttgggtaatatatctaattaacattatgctttgtaggggctgttaaagaaacacagaaatccactagcatgtgcaggatgtgaaacagtcatttcttttgagatggcaaaaaaaatgaaagatctgattcctggagatcaattgttgtgtaaaccatgttcaagggtatgtaggatcccttgttctgtgattattcttagtttagtttgaagtgatgcagaaacggttgcatacgtgtaagcctattttgttgttgttgcagttaacaaaatcaaaacacatttgtggtatatgcaagaagataaggaatcatttggacaataaaagctgggtacgaaagtaaaaacattaggttctatagtggtatagcttaaggttttggttgttttctattttgactttttgatatccgtgtggcatattaggtgcgctgtgatggttgtaaagtccggatacacgcagaatgtgaccaaatatcagataggcatttgaaggtatgttaattttggatttcatcaaggttaccctattatcatcggcttgtgtgtgttgagatcgagctcattttatgatctgaaggatttgcgggaaacagattactactgtcctacttgcagagcaaaatttaactttgacctatcagattcagaaaaacaaaactcaaagtcaaagtaggcctcttcgtcttaacttttattattgttttctcaacggcttccttttgattgccaaatgtctaaatttgggagttttctggtacagagttgcgaaaggcgatggtcagatggttcttcctgacaaggttattgttgtatgcgctggagtagaaggagtttatttcccgaggctccatttgtaagcagataccaatttacatttccccaacttctcgcgctgggttttcttctaaaactaattcaaagcaagatgatattgagatttaccttacctagattttcatgtttctttgctgaaaactttccagagtcttcttactccatcttgttatttacagagtggtatgtaaatgtggctcctgtggacctaaaaagaaagcccttagcgaatgggaaaggcataccggatcaaagtcaaaaaattggaagaccagtgtgaaagtcaaaagctcgaagctggcactagaagattgggtttgtacaattactcttctggtttctttcagagatattggcgtctttcttttgagtttgatctgacttactcaaaaggaaactgacatatatacctgccctaccattcacttactctgcagatgatgaacttagcagagttacatgcaaatgctactgcagctaaagttcctaaacgaccttccataaagcagagaaagcagagattgcttgcttttctatcaggtagaaaaggaaatggaatcctgtaacatgttgcagtgttttgagtgtttttgtgatgcttttgttggcttttcctttcgttgttggcagagacatatgagccggtcaatgcgaagtggacaacagaacgatgtgcagtttgcagatgggttgaagattgggactacaacaagattattatctgcaacaggtgctttttaatctttttttgctctagttttttttcttaaaaccatgatttcatctacctaaataatgggacttgccgttagacttatatttttgtgcccaatctttggctcacgtggagtgtgtaagatagggttttcttgctagtttatgtggataagatatttgagccagagagctttccattttaactatcatgtcatgtcctttggcaaacagaagatagttgttttctgtggatcactttatggcgacttgtgaagtatcatccattatcattgtttcataagcaacttagataaatgtttctttcattttcttgtcagatgccaaatagcagtgcatcaggaatgctatggcgctagacatgttcgtgatttcacctcatgggtctgtaaagcatgcgagagaccagatatcaagcgggagtgttgcctctgccctgtaaaaggtggctttataaagtatattcagctttttcacataaacatatggcaccactgcctattaactatatccattggctccgctatgttgtcactgatgataggaggtgcattgaagccaactgatgtggaaacgttgtgggttcatgtgacatgtgcttggtttcagcctgaagtatgttttgcaagtgaggaaaaaatggaacctgcagttgggattttgagtattccatcaactaattttgtgaaggtaaatttaatattaacttattgtctttaattttggacctttccataactgtctgcgaccaaagctaaattgcatgaaatcttcttcgttttgatggatttcagatatgtgtaatatgcaaacaaatacatggctcgtgtactcagtgttgcaagtgttctacatactatcatgccatgtgtgcctcccgagctggttatagaatggaggtatgcttactgtttgactgtttctgatctttcttcatgagatcagacgacactgactttttctatacatgcttttgaactaactggaacgatcttttttatatagtcgtataaagtgaaactggtttccgatagataatgtgtttttaatctttacttaaaggaacttgagttttttttttcctttgcaatttattatcttactccatttaaataggcatatttccatgcattttgtatgtagttgcactgcttggagaaaaatggtcagcagataacaaagatggtgtcctattgtgcttatcacaggtgaaatttctcagaactctgcttaaagaatttttggtgttacgatgttggtttatgatttataagttttatctattgtttttggtgtgtagggctcccaacccagataacgtgttaattatacaaactccttcaggagccttctctgcaaagagtcttgtccaaaacaagaagaaaggtggttccaggcttatttcattaatcagagaagacgatgaagcacctgcagagaataccattacatgtgatccattttctgctgctcgttgtcgagtatttaaaagaaagatcaatagcaagaaggtaatattgggtcttatccacaaaaagtctgtatgtttcgttgcacatctcctttgtccagtaggctgatctttgttttgtagaggattgaagaagaagccattcctcaccacacaaggggaccacgccatcatgcatcagcagcaatccaaactttaaacacattcagagtaagaaagtctccatgcagttcttctactccgtttcttactattattttttggatctgacatttctgggttgtattatgtgtagcatgtgccagaagaacccaaatcgttttcttctttcagggaacgacttcaccacttgcaggcaagaattctctgatgtttgaacgagattggaatgttcaggttttattttttgatattatcggctgtaacatgtgtatgtttaatgtaacagaggacagaaatggatcgggtctgctttgggcgatctggaattcatggatggggtctttttgcaagaagaaatatccaagaaggagaaatggtatgtcagcagacccatttgtgatattgtgtttggtctatttgggatgaggggagtgtttattgtcgagaggtgctattgtatttcaggttcttgaatacagaggggaacaggtgagaggtagcattgcagacttgagagaagcacgttatcgcagagtaggaaaggattgctatgtgagttgaaaaagtttccattttatcttcacaaattgtctcttctctctctatctctcttaaccaaaagaaggatttatgttgcagcttttcaagatcagtgaagaagtagtggttgatgctacagataaagggaatatagctcggctcatcaatcattcggtaagctgcttggcatggactttttacgtacaagaaatttgacagactgttaaagcctaaatcaaaatacgtggtgtgtagtgtacaccaaactgctatgcgaggattatgagtgtaggagatgaggaaagcaggattgtcctgatagccaaggccaatgtagctgtgggagaggagttaacgtacacaacgcatttctatatataccattcttcaatctaaagctgattgattgtcatagtttaagaaatgttgtgtggtgttttggcaggtatgattacttatttgatccagacgaggcagaggaactcaaggtgccatgcttatgtaaagcccctaactgcaggaaattcatgaattagaatagaaaggtatagatcctctaagtttacttcacaggctacaacaccaagaagaaaaggccaaagcaagattgtctctttttgctccaaaaacaatagatttataggtagagagaaaagctaagtgatccaagtctgatctcttctgcctctctgtatagacaaactcgtttgtgtcaccattatcctcaaaagaattcaatttcattcattttgttcatttcaacgagacttgagcagaaaacttgggataattccaactgttgtgaccgttttaccctataaccatcggtttactacggttataccgcgaaggtgatgagtcaattcaattgggaattgattttcctttcgcgccggtttatgaatcgtgctttcgtcaagtgccatgtcagacgaattgtagtttgctgctgataaaagatctcgtaatggttttcttaaaacacttttaagcgtttttgacggcccaattgatgcgaatatggattgactcttatctatacttcagatatgttcaaagccacacaaggtaaattgcataacggataacaattcccataagaaaaaatgtttcggtgtcaaactgtatatgagcaattctgaaacattctaaagattttgtggttatgtgttaaacttaaagcatttgatagagagatatttttcaaagaaataggaaaaaataatgttacaatcctccacattaatgtttacaatccgtccatctgtacttgacatgtcggatcataatccaagataatgggaatacagatataagttaaaaatgaattcactcatagaaacttggaaggctatattcgtcaatataaaagagcatcctttaaatagctgcacactggtacagtggttctactattgagtgaaaaaaaaaaaaaactaaaggcacgaataatttttgtctaatcaaaattatttaaattgctgctatttaagataacgatgaacggtgacgaaacaaagaaggtggagagcgagtacatcaagaaacaccatagacacgagcttgtagagtctcaatgtagctctacgctcgttaagcacatcaaagctcctctgcatctcgtaagctttgctttgctctgtttttcaagtgttaaagataacgatttttgagatgttaaatgatttgttttgtttggaaaaggtgtggtcaattgtgaggagattcgatgaaccacaaaaatacaaaccatttatcagtaggtgtgtggtacaaggtaagaagctggaggttggtagcgtaagagaagtggatttgaaatctggattaccagctactaaaagcactgaggtattagagattcttgacgacaatgagcatattctcggcatcagaatagttggtggtgatcatagactcaaggtaaattgaaatttccttaaatgtaccattcattccgacaagattattgttttttttagagcttaatttgttatttgtccaatcagaattattcttcaaccatttcgttacattcggagacgatagacggaaaaacagggacattggctatagaatcgttcgtggtggatgtgccggaaggtaacacaaaggaggagacatgcttcttcgtggaggctttgattcaatgcaatctcaattctttagcagatgttaccgagcgtctacaagcagaatctatggagaagaagatatgagatgtgacttgagaatcttttcattcggaaaagaaggaaaaagaccaaagaagagaaataactcttcccttttatagcaatgtctatgttttttcttcttctatttccattttctgaatgtttgtatattattggaagtttgtaacgaaatgatttcgaatagctgtcaaacgagaaatataaattcaaatttgtaagtgtttatatgaaatgcttttttatttttaacatttccacatgaaaatataaataacatatcatgacacatgcaaaatcatatttatgaaagttttttcaactctctccattttttcgacatatcagcattagatagagtgacacttatcacatcaacatatgaattacatttcttatttaatttaatgtatttaagaatttataatcatgcattaattctttctaaattttttgacatgtttgaacttattaattaaataatttcaatttaattaggtacaaagtatatcaaactcacataaataacttatttaaattaaattatataaatcgtataaacttatgtataaacataaaattaatagaattttaatgaacttttagatttgattaaagtataaaaattaaataatatgatataagaatttatttcatgttttcatatactaatatatatatatatatatatatatataaaagattaataacaattgatattagttaaatttacggtttagtttaaggtaaacccaagatgctctcatctggaattctgttatgatctgtacgtcctcaaagttccagagatgttgagaaagatcaaacatcagcagcgtcagaggctttttctctggagaggtgatgttgaatggctctatgcgctgctcggagagcaaaagagtcttgaagaagactctagcaaatccatattggcatctaagcttgatctttgtgttcctgttatgaaacacagaatctagactgagactgaagttggatacctcagctttgggatggagaataccggaactcttggccggagtaagaggatggaaagcatgctgaagatgagcaagagcgttccaagaaagactatgacgaagaaaacaaatcagaaatatactaagtatgagttgtttcaaagaacgtagtaatggtttataataatattaacaatagaataaaataaatagtaatggtttaagaaaatattaataatagtgagcaaaagctaagcaaaatataagcaaaacataataacatagtcaaaataatatggaaatgacaagtatataaattatatgttaaaagttaagaaattgacttggaggtttgtgttgggattttcccttaacttaaataaaggttttaaatgtgaacaaaaaaagtttgaagttttagttgggaaaatgttttgatttggaggtttgttttggaattttttcacttacctaaaaagattttggttattattaacataaaattctactaataacaattgatatgcttcttcgtgttaaaaacaaaaaaaaaacaattgatatgcttcttctttttttgtgcacccaataaatatgaattaaataagcatttttaatagatttatctcttgatagggtatccatctaaacaaatacaaaaaagaatacatttaaccaaaatgcttatctaatgtatatttaaatgtaaaactttattgtatttgttaatttagcaaaagataaaatgtctaattgctaaatcatatttacaaaatataatatctgttaattaaatcatgattcagttgtttgggctgttaattttgttttaatccgtctttgggcttgacccttctgtatttgcctattgggctttatgaatgttatgaatgaaaatgaatagtcacaaaacaaaagaaaaaaaacagaatttgagtcggtacacaactgttaacgaggtgtacttggtggaatcatagacacgtgtcttgacactcttaaggcctcttcaccaccaaattacttccctaacaaaagaattattattattgtgaagccccaaaagatcgaacattctaattcaatggcctacttgctgaccaagcaaaaaggaccggctccgttttcacctaattccgagcttcacaacgtgccttccattggttgaatattcaactggtttaaccaaaccgaagttacacatacgatttgagtcggtacacaaatattacgagacgtactttgtggacagtttgacacgtgtatcgccactctttatccctcttcaccagtcaccactcaccaccaacttaaaaataaaataaaaagagcatatattgtggagccccttacatgatcgaaaattctcgttcaaaagcattcgttaagaccgtgtgttgtgtgtcgttttttgtcgacgaaaattagaccggctctgtttttattggctcgtttcgattgaaagcgtggctataattggtttaaccaaaccgaagtcgacgtctcggtttgttcggttaagattaagccttgtagaacattccaaaacgccgcgtcaaagcttttagggtttgattctgctgtgtggctacccactcaagtctccagtgttcctttgtggctctggtttgccctattcttctcttccccctctctctctctctctctctcttgttttctttttccctcttctccaaggaatctggaaaaaattaaaccttttttctaaatccctggaaatcagaaaacttcctattgagaaaccatagattcgatccaagcctttgattgtatcaaaatctctgcttcaccaagaatttgggttgatacagaagaaaaaagttaaatggttgaggcagagcgcgcggagaatagttggattgcttcggaaacgtctccgtcgtcgtctccggtggtaatagaaagcagtgatttttcgataactgatggaatgagagatgtgagcggatttggtatagcttctcgacctcagttggacaagggtttgtcggaaaacaatatagggttcacggaaagagttttctctgccgccggagctgcggttttgtccgccgttactctaaatcctcttgacgttgtcaaggtaggagctttctattgttgtcttgattcatctgggaaattatatcttcttaccggcgaagatctaatgtttctgttgtgattttgtttatcagactcgattgcaagctcaagccgccggaatgtcgtactctcacccactcagtaactccattggacgcatggcattttttggcccaaacatggtattgtctctgaaatttttattttgtatgagtgttgttttaaaggtgaatactttctacattttcactactcagttatgtaatcaatacggtttcggttcagatgtttgcagacttgagatgttctccttcatgtgcacgcgctggtgttgaaggtactgtttctatttgcccaccggattgtttccagtacaaaggaacatttgatgtcttcaccaagatcatacgacaggtgagcatctcttttcatcttgttgaatgtctcgcagtgttaagaagatgatgataagtagttgtttgagaggttttgttttttgtatgtggcatgctttttagctagaagcttactatttctctatatcctaacgcaagaactgatgcaggagggtctgggacgcctttggagagggactaatgctggtcttgccctagctgtgcccatggtatgctcttttgcttacatttacgggattcttttgtttggatagactatggattagtaaactctcaagttttgcacaggttgggatatatctcccattctatgatatgttccgcaaccggttggaagaattatctcgggagaaagctcctgctatgacattttgtgtgcctactgtggcagggtctttagcgcggtccttagcttgtacagtctgctatcctattgatcttgcaagaacgcgtatgcaggtattggcttgtacttcttctgcgtgtggtattcttgtaactctagatgagtgttatgcttttcaacgagatctttctttatgggtagtactctttctgtgactcgctattcatattgtatttactgttttctctaagtaggcattcaaagaagcaaaagccggtgtgaagcctccgggagtttttaaaactctagttggtgttttctctgaagtcaggacagcaaataaccttgaaagtagctgtaagttgcttcttccttcttctcaagcaacagaagtgactattaatatcccgaatttgtaactctccaacgcatgtataatcaagtagagcataccacttaattagcaatcacaacccaagatgcatgcgtgtggacattgacaccaagagccaaggttttcttttatttagtctttgatatacatctttcttgggacagtgcacaactatcgtggtctctggagaggcttgggtgcacagcttgcccgtgatgttccattctcagcaatctgctggtcgaccctcgagccagtaagatctttaacatgtttaagcgttttacgatgcagaaggtttattttaaggcagttttgccaaatacagtaagtgaattgctttgaccttcccttatgatacagataaaaaagaggctccttggagttgcgggcaatgatacaaatcttgttggtgttttcggtgcaaccttttctgctggatttatagctggaagtatcgctgctgctgctacttgtcctcttgacgttgcaagaacaagaagacagatagaggtttgtttgctttcctccagaaacatgtttgtttacttgtgtcaccatctcatgtttctcccttccattaattcagaaggaccctggtagggcattgatgatgacgacacgacagacactaatagaggtttggaggtatgtatatgcatatttgaaagattccatttttcatttgttaaaagctctatgtttgttttgaaacaaaacataacaagaaatacttgcacacacagggatggagggatgagaggactgttcatgggaatgggtccacgagtggcacgtgcaggaccatcggtagggatagtggtttccttctacgaagtggtcaagtatgttctgcatcgccatgcttcatcatgaccctgcaaagtcactaatctcctaaacatggatctgtggatacggctttaggttgtagcttcttttttcaagttaacagaataagttaaacaggctcaatgctccagaaacccgagtttcctctgtttatgagccttaattttgtccagttattaaataccggctgtttttaatgtttaatccggtttatgtcggcccgatcgtacttcaacataggttgtcttctcaacttagattcttatcatcaaaaagtatccatgagagccttctcaaatatgaaaagcaaaacgcactattacgatttccttaattgtaacctgaggaggcgacgatgtgtaaaacgccattcatattgtcccgctttagtgatgaattataagtcttcgtttgtcgaaaattaacgaatgtttttccacgtaaaaattgttgacgatggcattgacttttctccgacactgacctattttgtattttctaatagatttcttcgacctttctattattagtcctttcagatatcaaccgacaaacacttaataaagaaaaggttttgtcaacgttaaaataggagacttctaatacctttgatgcataaaactagaacatgattaaagagttagaacatagttgagacaaaaagaagtaggaaaaaaaatagtaacacatctcaaacagtaacaacattttaactaattaataatgatgttctaattttaaaattttggcagcgacctacaatgctgcaaaccactgaggattcgataaatatttacgcactaccatagtgaagacatttctgaatttgatttttttttatattgtcatctgacaacaattactatgttggataagagcaaggaaaaaatatgtaatcttgcatctaaagtttgtataaccaaacaaaacactaagctttagtatttcaaacctttttatgccactttgtaaatgaatattactttctcagaattgagaaacacctccaatgtaattatctgttatagtttacaaagaaaagttattatagagtcctcttgcatacatgtctacgaaaggtaaaattctttttctatatatacttcagtactcaataattttcaaaatgactatggtttcattaatcataaccttgaagaagtcttttagtccacattttctccagaagaaagggacttgtagatgtctattttaacaatttcttattgtgtgtacacataaatcatatatttaaaaccaaatatatatatatatatggatttgactccaatatgatttcaatgaaaccaatcgggcaaatagacggtagaagacgaaatccagacgaccaatgaaaacgttaagctttctgtttgtttgtgtatatattaactatttggtaaaaaagaaaaacataaacaaaccacaaatgtggtcaccaacaaatatgtgtgtatgaattcaaaacatcgtaattataatggtacaagtcaacatgtggagaggcgcttatttcttacactagtgcaacatttcgtactcattcaactccttacctagtaagttgtattataattctctcatatgagttgggacataattatttctaccttttgcttctcccttctgatgttcggcattggttatgctttttttttttggtgggaggcatttgttatgatttggttgttaggaatgtacattaaaaaaaaaatctattggatttaatatcttaagcacatgaataatttatttaccgtaaacctttctcctatttaaatattttgatactatctctaaattgatccagccctgtacttattatttatatatacactttcatcgaaaattaatcttcaagaacgcgggaaaatattttagcagttatgaaaatattgaagttcagaacactatcttttaagatttaaacaaaattcaattgttgaatgaaaccgaaattttgaagttacgggcaaatatttcgtatctataaatggaagctattctagttgggagttcattgcatttgaacattattctacattcacttaaggaaatattacccttttttgtctataagaaaaaaagttataaggaaaaccagaaagtgacgaattattcaaattgtaattgattgagaatcagtgtcaacattaattttaagaaaaatcaaatctagtaacaatatattttagtcaaagtttaattcttagaaatttcatatctgaaaaggatagtttccaaattccaaattagtagtattatttaccgccagagtcagaacacaaaacccacttttgtttaatagagaaaggcaaaaagtgcaccgactgacccaaaagccacttgctccaccggtcactaccgtgatttgcgcctcctcgtgtggtctctctcgccaaagagaattttagtttcgctttttataatcaaaactcgtttacaaaaaacttaaacacgttcgtgcaactcaaagaaattgacaagaacaaacaacaacaacaattctaataaattaattagtttattcttttcccaatatttctccaaaactgttttacaagccgacgataacattaaattacttcttaacaaaatcacaaaacacccaaaaaaaaagaaaaagaagaaaaaacaaaatcttatcacaactccatacaaaatttgaccacaccggcgattttgcaaccaaaccggtgtttggttaatggcaaaaatatcacacaagtaagagatcggatatcaaagaatcatcaagatcgttgaacgatgaaccaatctctttgatctcggaggagtagtattcttctgcgttgctatcgaataacataaggtcgttgaagaaatcattctctgttggttgaataggagacataggttgatcgaagatggagatgtctggtaatgattcattgaaatagttgtcgagaaatgtaatgtccaatggaaatgaatcatcattagtattagtattaccttctccaagatgccagcttattggctcttgttctggttcaagaaactcttgtttaaccggtttgataagactatcgattggttcctccgagacatatgtttggtagttgagaaccgatgtcggagatgatagatgttgagaatcgtccattgattctgatatcgaaaccgacatgttgctctccggttcttgttcttgttcttgtaccggttctggttctggttgtacggtgaagttggtaagagcatcagggccacgaagtttgattgctgcgttgtcgtagacgatggcagcttcctccgccgttgcaaaagtaccgagccagattctccggcgttgctcaggatcacgaatctccgccgcccattttccccatggtcgctgtctcacgccgcggtacttcttctggttttggccggaaacagagggcttttgaaccgtagaatcaacgttgattcttttccggtccttcgtcggagaagcagagacgtcgccggtggaagagctgctaggctcgactctgatctcgttaatcaatctcttgacacgtcttcgagggaacagaaactcttcctcgtcgcttgatgaatcagtggcgtcacgatccgtcattgagacccgaaccaacctggccgagtcacgaacactggtcttcctctccatagacgactttttagtgtactttctgataacagtcttgtgctctgtgtacttcactggtctaagatccataaactcatccatcatcatcacctattattttaaacagagagattctggtgaaaaaaagaacagagattctggtgaaaattttcagagatttggagaaagagaggaaaagggtatataaaatgaaagagaaagagagactgttaagtttaaagtgagaagattcagaagtcactgttaaatcctactttataggatctttcgggctttagccatatttggtatatataaagtaataaatagaataaaatatttttatattctttgcttttatttacttatttccattttttcacttttgaaatatcctcttttaccgtgtcacataaatatactgtatcagttttacatttttacaccgcctaacacattttaaagtgacaataaaaaatgtaaaacaacaaaaaagtctttgtaaaaactatattatttgtgaaacatataaaaagtaaaaatttacatgatattttggtagtcattattgataacgataagtagaaactatatattttaaaaattgttaagttatctacttttttttttttttttggtttttaaacattctcaattcgtcaattcgcagtgatatattagccacaaattttgatacagagaggagtgaattactaaacgggacgccgcattcatataagcaaatcgcatgatgacacctgtacaaatgagatatttttcttctttgagatgactatctttctgctgagtcagcagcgcgtggcttctaatctcgaaatctacgatgcatatcacgtgaccccaagatacccggtcccagttttattttaactgctttcattttttgaaaagatatctactattttgtttttgtttttgaaaatgttttagttacagacaaatatgttttttatattattgaagattaaaatattttttaaaaaaatatgatgacttcacccaggtttgaccgacatctgtagcgaattcgtttagctgtttcgtcccatgcattcatttcttatgaacaacctgtcacgtgatgtgttttcctaaagtgcttattcaacagtaaatatactatttgagtaaatgctatatttatgttccaaatgagtaaattccgaccaatgtaaaaagggaatcaatctttattttccagtaagaaaatatatttgtttctgttattatatgattctattttaaggaaaaactgttacaaattattcagtaaaatcctctcatttccagtgagataagtaacgtggcgggcaacctaggatttggcgctaattttttttttttttcgtttcagagctttcatttttgaaaatatgaaaattcaaaaacttgaacttacaaaaattcatctctaaccgagttctgatttagtttagggttgaaaaaatcagttgaaaattacaagtcattatgaaaccaaaaaaaaaaacacgagatttttttttgtcaggttagtcggacgagcatcagaatagtgctaactagaagcagagagagaggaagatcggttaagaaaggtcgtgtgagagaagccaaggacgatttgattctgaatatccaaagtgggaagaagagagagacatggagaatcctttggattgacaaaagacaaaccccgaggtttagtgcagtgttcttggccactgtcctacattgagccaagtgaccaatccacgtatattttatatatgcgtctattactatacgaaccatattataatacgtacatgtgtgttactaaaaacgacaattaagtgactacattgaaatttagacaaactgtgaatcttgttttagacttgggttgaccactttcttttttggagcgataacaacttctcaccaatgacttttaataacgactgggttgaagtaacaatacccaacccaatatttataactttttgatattaacatctttttgttgccattcaccattaatcggtgacatgtgacaataaaaagaagattgcgttacagattttgttgaaagctaatacaatgtgtcatgtgtgcatatataacgtgtccatctacggttatgaacgaagaatccaaatagaagaaagaaacgagacttgttggtaaaaaataaatttaaggacaaagatccattcttaaaagaagggccacccctcaaaatagcaaaacgttgaaagctttatcaccattagttacttatataataatgtgatgtacgttggtcttggtgcatagctttaaattaaaaatgagctcgaactttgatggacaaataaagactagagaaggtcaccgcttgagtaattacttctcataaccaagtttatgataatataaattaacgtgtgagtttcgagttttcccaaggtaatgtatgtcttggagcagaagctacatggtcgcgcgactcgtgagtactactcaagtcattctcgtggacagccttagtttacaagcaagaaatgttggtcatatatctaataaaaataaaaatagcttacatagatacttggaatttgttcgcgaacattaaattcatcaaaattttataataaatatatgtagtacattataggaatatatatgtaaatgtataggtaaaagtaaaactatagcttttaaaatagcctaaattattattggttattgaaaatacactaaattgaaatctaaatgtaactatttaaaaataatttatcgaagttccattataattatttttattcatatataaataacttttttatgtacaattcaaacttttaacaattatcgtaaaaacatttattcattaatattctttaaaattactctgtagaaataagtgcccaacccaatcgatcatttgagctaagctctaccttactagcgttgataggaataacatgttaaatgaaccaaaaggaaactaaaagttaaaccaatttgtttaggatctggtgcaagacaaattgtctggttcggagagtttgattttcacggtgaaaatttcaccgaaaccttttagtaccatgactcatggcacatgaatcgtgactcctcttcttacctccacttgtcttgactcttgagaccgctgaagtgtccactgtaattttaagttttattcaacgcaaaaggttttgtttaagagatttgattcacggcaatattaacattagtgactggtcattaatgccatttagtggaggccaccaaaggttacgattctctaatttactaaagacaaaacaggggatctctaagatcaggctgtaactaagttattttcttcagttctaatttaaatatttaataaaaacctggcgttaaccatgctctcttgggcacgacctctctctttatcataattaataaactttttttttttaagttatggagactttgaacatagattaaaagtagtccagtcactgacagagtgacattgtataagttttcgggggtattgaagggatatttagtaagtaaacccttcggtcgttagacataaaaattagaaaatttatggtgactcttagaaagtactatattctgtaatagagaacggtccatgctcgaatagatcgtgtaatggttatttgggttgcactttaacaaaaacaatggttttaatttgggttgcaacgggtgttagtctgcctttaattctggaaagctgatattctgatttcttacaataattttcgtatttttagtacatgaaacattgccgttggtgggttaatgtaattgatatattcttagtgggattagacgtgaatcttttctttttgtgtaatagtactactcaaatttgtgagatagtttttagaaaatctgttgaatcatgtaaaaggtcgaaactagttgaaagacaaatggtaagataacttataactctagttttaacggctttagctggttggaaacagaaagttttactgctttcgttctttctaatatgtttagagatcattaaatttcgtacgtatgagtattcatatacgaatataattggtttatgtagaagtgtagaacacagtaatgtagtgttatgctgttaggttttactatataaacaatttctattcatgatactatataccatgcatacatatctattacaattacagatttaacatagaactattatgaagtaaaagacaagattattcaatgcaactgctaacccacactaagaccatatatgatgctgagtttacatgtgcatctagtgactagtggtagtttaaatgctttagaaggaaaagtataccattcggttctaatagtataatttatttacaagttttatcagtagtagtgctcgagtagtgaaaacacacatttaaaaacttattcgaatggacttggaagcctcggtaaacccaaaactcaaaatatatagaaatacaagtgttggagtttcgagaaagaaaataaactttgatttgaatcttaagataaagagttttaaagattaacatgaattgatcaagcgtccactagcactttcattaagcaaaatatgcattcataacattttttttttataaatcgtcaacaaactaacgtgaaattataaaatcataaccttaatctcaacataataagccctgattactgctttaaacctcgccaacctcataagctcccaaccttaacaacaacatgtgtccatcgaagaggaatctaattcgtgggataaacattatgttaaaatatactatactccatcactgaaacagaaccttgaacacaaaagtgtcataatagttgggttataccataaaaaagtaaccgttttttcaaggtctttataccataatgtttagtagcactaatggctaaacccgtttgagtatattatttggggaaaaggtgattttaatagttttactattttttgtaaatcttaaattggtcaaacttcaaagtgataattcctttgtcccattttattaaattgttccagatggatcacaatcacaatcttaactcatgaacaacttcactcttaggccccatacaccatttacataaatcattgcccacataatactaaaatgaaaatgttacgtatgtaagttaataatgtttacgaaaacggaaaggcttacgattgtagctagtttgggctttggacagaataaaatccaaaataatatgagccttgataaacacagagacgcatcggcatcacgcaataaagaaacagcagacgggatgatgatttacgttttacaattccatagaatggagatcaaataatttcttactgatcctgtcttcacaaattttataagacagacaagtctataaaagatcattacatagaaataagaagagtttaattattagggctcttccttaaggacagtatttgtgtcagcccatggcatacttttgggtccaggtccgagcagtggactcgtacttgttcttgtctgtcttgtacatgtgagctatctcagggaccaaaggatcatctgggtttggatccgttaacaaagaacagatcgatagcagcacctgttgcaccacacaaaattgatgtcacctggagagcaaagctgcaaaattatggttctaatatgataaagatgaggaagaacaaaagaaaaccttggaaattgtgagagcaggactccactgctccttcaagatgtcgaggcagatgcttccattgctgttaatgtttggatggaacaccttcgtcctaaaagccacctacattttttgtaacaacatacatagagagcaatgaaatcaagaacacagagaaaagaacaatagataaacgatggaagatattagcaacagaaaaatgatggccgaagtaaagttggaaaaaaaattcaaagaagaagaagcagctgtagagatttgaatataccttaggaggcttaaatgggtaatctggagggaaatggatggttacaagaaaaactcctccagaataagggctatccgatggacccattatagtggcctgccaatgaaacatgtcttccgcaacgggtcctgtcaacatttaaccaaaacttcaataccaaaccagaaaagcaacaacatgcatataagaagaagttggtaaaaggggcaaaattagaagagaacaacagagttataatcctaagatctcatccaaggaaatcaaaaaatgaaaccagatctatcaacgagcaaacaagtttgaacattgacctttatgattcattcctagaaaaatcacaaacaagtgttaccatgaagtatgcaaatttctgttattagcagctgaattacctaaaaatcaaggataattagatctaagctaacgagagatcaatatcaaaccgtcgcacacataaaaaaccagctcaaaagaagatcaaaaccaacgacccatcattatccagcaagaggaacataattattgaatcaaagttgataaatcgactaaaagaataggtacctgcgctacatgaagtaggaggatccttctgcagatccttcaattccttcaaaatccgtttcgatgccatttccaaaatcccacgatccaaattccaattgaagactctgcaatcgaaaaccaatccaatggtcagatgaattaagaagaagaaaaacataacccagaaaattatatataaagacgggaagaagatccaaaatcataactccgaattcacgtttttggttttggttcttcgaatttaggagaagaaagggtggtgaaacggaagagaagaagaagttgaaaatgttgtgtggtcgcgaccacaataaatagggtgcgggtaaattctggttcgtttgattagtggactctgctgctttattctttcagattcgttcgttttaaataatgtcaaacttttttttgggtgggcctaactcagcgttgtacctacggcacatataaaataacgcggttgttcgtatcatcatcatgtggcgccgatgttttccaatcccgtcgaagcgtcgtcgtttaagtggtttagtcaaaagtcgtatgatccgacggctgagagttttgtagaacgaatcatttgacgtaatttgaatgaatttaccatgctttcaagattgaccagcggttgatgaaggatgttttttttcaaaaacgtgatgtgtaggaaattattacattgtttttactgtcatatgtcatatgtgacaagacgattcgttttggtgacaaagtataaagatggaggatgaattaacataacagtgacattaagatatattcgacaaattagatgttaagctagacattatttccacgaaatatgatctaacttgttaagacaaattgtgaaggttgcggttggtgtgactaagtttgcctataactcaaatagtttttacttgaattgaatcaaacaatactataataactaaatctaacgaaagaataagccaaagtgattatagtttttatatttttgctgaaatgaagaagtaatttatcatgatcagtaaaaagaatggtatgcaactaaaatttaccaaaataattaagattttcgctaatttattattattagcactgctatagtgttgtacatgagaagttaattaacaaagatcatgaattttcatcacattttttttttttgttaatttgaattctgaaccgtggaactatctacatttactaaaggaggagattctaaatctatttgattatcttccggatccaaaatcttgggacatctctcattatttccataactttcttttgtgagatgtttgaaccatctcttctgcttcggttgttctgcacttatggcaatgacaacgtcattggggaagagatcacgttggacaaaagcatgcatcaccgtcaacccaagcacagctatcaccgtcagagttgctgctcccgacatcacaaccgatagtatcttcgttgccactcccgtgacttcgtctgaatatttgatcgtcgcactggccactgccgtcattggaaacgtgtaagcccaccaagctagcgagaatctgatattttttgaataattatgtcagataacatgtatgttatttggtttggtaaattagatccttgcagttcaagaaacagcttacttgaatccccggaaaaggttaatccgacaaacctgaaacaagaatcacaagaagtaaagctgttacatttcttgtaccacaagaaactcagcactagctcactagaactctgttaatgaaaacaaaaactaccagagagaagtacaagaacaaggagatgaagtatgctagacgcgaaccgagatcgaaagaggcagagatcttggtccaggccatggaagcgacggctggtgcagccacaaagaggaagaaaacagggtgaagctctttaggtaaggtttcattcgtgggaagtctctgatagagagtcacaaataaaaccaaataataagccaaccctatggcaaagaagaatattggtccttctttcaaccccatggatgctcctagaagtgctcctgcaaagttaccgacaatggaaaggtggtttgtagggttggcgactttggagaggcgtctttgtccaccagacatccactgtccgtaaatcttcatctcaagaaacaagatgggagccataaggaagtaccaaagtgtagagggaagatgtgagatgatagagtgtgggattccaagtgccaagaagaggattgatataagaggagcgaagaagaagttgactcggatcggatgccgaaactcacggcgaaccgcctcaaagaagaggatggttttgaagaggtaagtgatagaaacggcgaggaggagaaggagagagatccaccagagcacgtggttgatcacttgagtcacgtgcaagaacttctctgcctctgtggttgctaaggtcttccacatgatggcttgactacttactccaagacacatcccatatgatgtgattggaaaccgtagaagaaacggccacgttttgtcctcaggcagaactatcttctccttctcctgtcatccaccaataaacccataaatagaagtaaccaaacacaagtataactcaaccatatgagcaaaaatgaatgataaaataccttgagagtttcaagctcggggccttgaagagcatcaaagtatctatcagcggttaaagattcagtaatctctttatgatcctgcaacgaactctcagtgggtttcccacgtaaattcgatatctgacgttcgagtttcccggacatggtcctgaataggtcatacctcttgtcgtggaagtttctagatgcttcttgatcaagaaacatggcacctcggggcatagacttggaatgaaacttcatcttcctcgctccgattcgtttctctaatcttgagaaatctccagaaccggattgacgttggttttctaatagatctgagtggtttgctggagaaaccaaaggactaaccgatcttggattattcattgttttccctgttttagtacataaatttggaactatatttataaagatccaaatatataaaaaccgaatcaaaacgtcacatccaacttttgcaaatgggttagttgtatattattgttaacatattacgaaaacgaacatgcaaaccacacacacatacataaatgtatatataaacttacagaaaatgaagagaaagtgatggaaaaagaaaatgtagatctgatcagtgtttgaaaagaacagaggatctgatcagtcggtgtgactcttttgtgtatgtgaagtcaaataagtcctctgaaaatggtattttggtaaatatgtgggccagaaccaaagatattgtgtgttttggctttagtgctgtccagataaagtatcttgtctttcacttttttgtttttatttgagcagttttgttttgaccattacttcttgtctctcgagttatatttgtccagttacatcttaaccgatatgatcaagtgatggactccaatctgaaggtagtcccaggctattgttaaaggcactgttaatccataaatacaaggacaacgaccgtaagaatacattgaaattgaatcgtacaaaaacgttcggataaaatatgcaaacaagtaaaaaagacatatatagagtagagataatgttcctcggaatgtcctagtggactcgaaagtcaaggagtcaataaaagaggcggctttgcactctcgtttagtcgcgtctgcggatttttagtatccgttccgtacactcgtcaataaaatcgattatagaatgtttttcctactactgttttgccatcttgaaagtttagaattatagtgatagtaatttaagaaaatgaggttctgtaatttgtaatattgggctgattgattccttttttttctttcataaaccttttgatgggctaacaaaaatcatcctacgaagcccatttagctgatcctttcactttcacaaatctcatgatctttatccaacgcccaacgggctacaacaaaaccccattgtccgagagttaatagaaagctgacgtctgatgtacaataatccaacggcttaaaataatacaatcgaacggccaaaaaggaaagctgtatttataaggtaataagacaaaatagcactagtttctctttctccctccattttcagtaaataaagcattctattttttcttgtttcataagagagatgggaagaagccattcttctttaccaaaatttctgagtcttaccaagaaagtttaaaacttttcttcaaattcctggataagctcaaaggctccgttcgtacagcgaaaaaaatgttgaaaccgaaagttttactagttcccggagaagacacgccggctcagaaaccaccgttggtgtcaaccgaagaccaaactcaagagaggtttattttctcttcctactttttgtttctattatttattctttctgtacattctcatttttgtattttttcatgaaaagtttcttcctttatgacccatcttttgttaactaaaaagtagggtttatgtctctgagaatatggcaatgcaaggggattcagtagaatcagacgttactgagcaaaacagtgaagggtatctcaaaatcctagacaagattcaggcaaaatcttcatcaatttttgagttttcgcttcagtttgatgacgtggtcgcctcgctggagaagaaggaagaacgactgagagtggttgaaatgaaggagaaggagattggtttgcttgaagagtcaatatctcgaaggttaagtgttttagaggagaaagagattgaaactgatttgagattggtcattgaagcaagtatcatgagattggtgcttgagaagcagagtgaagatttagtgacacaacttaaaacagaggagaataagcttggtttgtttctccgttcgacgacgaagaaacttgaggagctggtgagtgagtttgatgggaggaaagaggaggcttgccgagtttctgagaagttgtgtgagttagagaaggcagagaaggagtttcatctgaaacaaagagctgagactgagagacggaatgaggaaagtgaggcaagagagaaggatctcagggcacttgaggaagctgtcaaagagaagactgctgaattgaagagaaaggaggagactttggagctgaagatgaaagaagaagctgaaaaattgagagaggagactgaactgatgagaaaaggtcttgagattaaggagaagacattggaaaaaagattgaaagagcttgaattgaagcagatggaattagaagaaacatcaagaccacaacttgtagaagcagagtctcggaagagatccaaccttgaaattgaacctcctttgttggtaaagaatgatagtgacgctgattcttgtactcctcaagccaagaaacagaagtctcaggaagcaaatgatggagacattgaaggaattgtctgcacagataaaagttatgaggatcctaactcattaacttgtcctgatacaaagcttaatgattttagcaagtcaatgagctcatttgctgttgatcaagtatgggctttatatgatcctagagatgatatgcctaggaactatgcccagatcagggagatttttgagtcccagttgagtttgcaggtgacactacttgaacatgtcaaaactacaaaagatgagcagtctattctcagtggttgtgggagatttgaatatggagatacagagatcaagagccacttgatgtttgctcatgagatggatcacatcaaatctgctgaagaggtcattgtgaacccgagaaaaggcgaaacatgggctcttttcagtgattggaatgcaagttggaacagtcacctagaactacaggagcttccttatagatacgactttgtggaagtcatctccgagtttgacgatcttataggcattcaagtggcctatatggggagagttgaaggatacgaatcggtttttaaccatgctgagcagtatggatgcatcaagattgtgatcccacctgcggaaatgcagagattctctcacaaagttgaatcagtgaaattgagcgggaaggaggaagagggaatcccatttaggtccttcaagctaaaccctgctgctatgccgagatactatcatgtgcttgaggaggtggtggaaacggaaatacaaattaaagatccaacggtcgtacatcaaaatggatccacaaaagatcttcccataataatagattgagggattcaagcctggttggtgcacctttcttatctatgcaaatatatatttaagtatgtagagtgcttggtgatggctgaggttgcaggaagtagtgaaactgtaatctttttggtttctgtatctgttttctaaactgtctatcttctgaattgtaccaacttcctttgatataaataaaagagaatgctttaggaaaactaactgcctacttgctcgcttcggcatagacctcacatgtggattactgagtgtctcaaagtttcaactttgttttcacgaattgcattaaaactaacataatgaccatcctatgttgatcaaatgcgtctgctgtaacagtctgaacactacaatctaattgacacaagtcaatacaatccccaagctttgtatatcctcgaaactccagttctattattgaaaccatattcgtgcatttacataaataacacataacagaagtaaagactgaaactttagagtctaatacatcattaccttataaatacttccaaatgctataactatagacaatataaacgccaaagataaacggaatacgatccataacctttgcatcatcactcaaagcagagtaagtagtggctattgactatcctctgctgttgttgagaatcgaacctagagttcccaaaacggcgaaagcaagcaaagggctaacgtcaagcgtatcaaagactggagggataatgttcctgaagagattaagataaggatcacacagatctctaatggctgacaaaggctgacgatcccatggaatgtttgggaaccaactgagcaaaactctgaccatcagaacaccactgtatatatcgagccatttcgatagcccggctgcaactaccgtcaacggagtgttcagataaccggcgggtcgatcacggagcgacgcgaagaacaacggacttgctgttcggaaagatgcttgaatctgtggagataggttcacaattgcgacagagagcttctgaattagagatttgattacgacgccggctagaagcacgagggtggtgatcgatctagttgagtcggagaaggggaattgagaagggggtttagaggagagtaccggagacgaggaggtaacggcggaggaaacgatggttctagcgttatggagggagagattgaaagagagtttacggggaagagagagacggggacggatgatcggaggaggtagtctagggtttgcgagaattgaagcgcgaagagcgagactgttggttgtgaaagaagccatctttgttcctcggtgccggagattactcactcctcagaatgttgtatcggaggaaataatgaacccaaaagattaaaatagaaaaataaaatatttatttttggtcaaaaatttatctctttgtataaattattttagttacgaaacttcgttgcccaaaatataaaattaaaaaaaaatacgaaactaccttctttatttatttttattcaacaaataaaattaatttaattaaggatagaaaatgaatcgaagtagtgtactagtggtatagttaaagaaaaacgttttatgtaccagcttttatcacaacagctttacattgtaaccatgtttgaataaatcaacgaagaaagtcgttaaaaaaaaaaaacgttttctgtcaacaaatataattaattaggacggttctaaaaaattaaatagaatttaattacttcccaaatttgtagttttttttttgattcccttgaaattaataatctttttttttcccacaattttattaggaattttacaacggttgttatttcccggcaaaaatattaacgaccataagagttaatggaagaagcattgctaaaaatagagggaggatcgtcccacaccagtcaaacctatatgtcttctccgtcgtccactaaaatcttatttacccctcaaaaagacattcctccactacaaaaacttgagagcaaaacaaaacaggttatttgtttgacaagaaaacacaaaacattcattctttcgtttatatttgaatatctttccttctagggaatgctaatcaaggatttgttcggcagaaatggagcagaagagcgtgttgttttccgcgttaggggttggtgttgggttagggattggtctagcgtcgggtcagagtttgggtaaatgggcaaacgggtctatttctgcggaggatggactaaccggagaaaagattgagcaagagttggttaggcagatcgttgatggcagagagagtagtgtcactttcgacgagtttccttattacctaaggtacattgctcgacatatctttcttgcattttattactaaaagattgataacgttgcctaaatgggacagtgttgtgttatatactaatgtttcttttccatgttgcagtgagaaaactcggcttttattgacaagtgcagcttatgttcacctaaagcaatctgatatctcgaagcacacgcgtaatcttgcacctggaagtaaggccattcttctgtctggacctgctggtaaaaatctcctacccttttgtcttccaacctcaatctttttctaattcagactttggtgtaattttgttgcctcttttactctgcagaattctatcagcaaatgcttgcaaaagcattggctcattactttgaatcgaaattactgttactagatataaccgacttctctatcaaggtgattcattgcatacaaatttagtatctttgtttgctaaagaacagcttgtaatgttcctctttcatattaattgttacagatacagagcaagtatggatgcgtcaagaaagaacctgtaagttacttgtgatcttatgttgtgtagcttaattttgtgtgttgaccatgattatgttttctttcatctctaatgttttgatagtctcacaagaggtctatttctgagttgacaatggacaaaatgtctaatttgatgggttctatctctgtgctctcccaaaaggaagctacaagaggtacaatatcaaaacactggtctttgtttatgtattgccctcaaaagatctcaagtgttcgcgttcttgtaaaatttagggaccttgcgtaggcacacaagtggcaacgatcttcattcaaggtacattgtgttggttttgatatcttgtttgttttgtcatctggaatatagctttatatgttttatgctagctcactaattgctctcacgtaatacgtcaggggctttgacgttacaagtcagcctccacgactcaagcggaatgcttctgctgcttctgatatgagtagcatatcatcccgttctgcaacttctgtttcaggtgtgtgaaagcattgaaatgaataattttcttacgtttaacaaggtctagatcctctttaagtcttattctagtttagatttctaaaccctttttgttcatttgtggctgtttatatctttctagcttcaagcaaacgcagtgctaacttgtgctttgatgagagacttttccttcagtcactttacaaggtaacacttaaaatgaaatcagcagggaaagattctattctcgtgcaattcttaaactgaacggttgttacctttacaggtcttggtttcgatttcagaaaccaatcctataataatatacctgagggatgttgagaagctttgtcagtcagaaaggttctacaagttgttccagaggctcttgacgaagctttctggccctgttttggttctcggctcaagactattggaacccgaagatgactgtcaagaagtaggagagggcatttctgctttgtttccttacaacatcgagatcagaccgccagaggatgaaaatcaactcatgagctggaaaacgagatttgaagatgacatgaaagtgatacagtttcaagacaacaagaaccacatagccgaggttctagcggctaatgatcttgagtgtgatgacttaggttccatatgccatgcagatacaatgttcctaagcagtcacattgaggaaattgttgtttctgcaatctcctaccatctgatgaacaacaaagaacccgaatacaaaaacgggaggcttgtaatatcttctaataggtactaagaaccacagttatctcttcaacaaaactaagtaattattattttcttatagctaactaaataaatggttctgcaacagcttgtcccatggactgaatatattacaggaaggtcaaggatgctttgaggactccttgaagctggacacaaacatcgactccaaggtataatacagttttgaccatgtactttaaaattttaaagtgagtaaaatgtgaatggctctggtgcaggtagaagaaggtgaagggataacaaagagcgagtcaaaatctgagacaactgttccggaaaacaaaaatgaatcggatacatcaatcccggcagcaaaaaatgaatgccccctgcctccgaaagcacctgtacatgtaaactaatacatatgattcagcattgataccttgatgtgtttgcctgaacataggtttgattttccttatcctgtcaatgtaggaggtggctcctgataatgaattcgagaagcgcataagaccagaggttatcccagcaaatgagattggtgtgacttttgctgatataggttcactggatgaaaccaaagaatcacttcaagagcttgtcatgcttcctcttcgtaggcctgacctgttcaaaggtggtcttctaaagccctgcagaggaatcctcctctttggaccacctggtactggaaaaactatgatggcaaaagccattgcgaacgaagctggggctagtttcataaatgtgtcgatgtccacaatcacttcaaaatggtttggagaagatgagaagaacgtgagagctttgttcaccctcgcggccaaagtgtctccaactattatatttgtggatgaagtggatagtatgctgggacagaggacaagagttggcgagcatgaagctatgaggaagatcaaaaatgagttcatgacacactgggatgggcttatgtcaaatgcgggtgaccgtattctcgttcttgcagcaacaaacagaccatttgatctcgatgaagctatcatcaggaggtttgagcgaaggtaagcaggcccggtacgccttttcacttgaaaccctgaacttgagctgtactaactccagcttctgcttttgttttgttgggagacagaatcatggtgggtcttccatcggtcgagagcagagagaagatcttgagaaccttattgtcaaaagagaaaacagagaatcttgatttccaagagcttgcgcagatgacagatggctatagtggaagtgatctcaaggtttgtcacagttcccatctcgctttacaaacatctgaatcttctctttatgaactaattattgtgaatgttatacaaacagaacttttgcacaacagcagcatatcgaccagtgagggagctgataaagcaagagtgcttgaaagaccaggtaagaactcctaaaactcgtccttcctttatttctctactttctagcgctagaatgagtattttaatggtggtttctcataaaatccaggagaggaggaagagagaggaagcagagaagaatagtgaagaaggatctgaagcaaaagaagaagtatctgaagagagaggcataacgttgagacctttgagcatggaagacatgaaagtagctaaaagccaggtaaagttaaaaaaagattagttgcggtgttgatgatgatcatgcgcaaaacactaactgtttcgcgtttacaggttgctgctagttttgcagcagaaggagcaggaatgaacgaactcaagcagtggaatgatttgtatggagaaggaggctccaggaaaaaggaacagctctcttacttcctttaataatccatcccactcctatcaacatcttctacaatgacatattctcaaaagtgtttataagttctgttatttcattaattagtaatttagtattatcatattaaacatttgatttcagagattttgtaaataaaaacatgtacagttaatctatatcttgtatcttattatataaagattaacggtttatgtattgcttagagatgtactgatcataacttttatactaattctagttgcaacacaatattcaatgatgtggcatgcgtagcttacgaaattattattagaatccacacagaacacaagaaagcagctagcaagtgtaaagactgagactttaccagcacatacaacgccacacttgaatctaatcactctttcaactgcggatcgctagagctagtagctgtaatctctgttttggattctgaatttacagcttggagggttctgtagaactcctcaggaagaggcccgggacggtgatgcggaacatgtttaggtatcggtgcaaggatcaaattctgcatatgcaaacattgcaatattgcatctttaacaacaagtaagatcaagaatatggatcacaaaacagaacagaacagggtgtaacgaaccgatcattttgccaacgagagtgagctcatcgctagcttcctcgatgagctcctcgactttaccacaagcaagtcgcttctcaatcactccccagtcttcttcttccggacacaccttgagacggtggcgcatgaagctccccactgctttccgctagtcttcatattcaggaaccaccaggattttcctttagcgttttgctatcgaggtctatcagcactgacctcaacgatcccagtcgtctgcttcaccttcgccaataatggccgaccgatcacacgctggaacatctccggcccgccgctagatacgcttctctccggcgaaatcaaattatgccttttcagattaatgcgttgtctattttggcccattcaatatgggcctaaatatattaacgggctttactttggataacccacccctaagcagagcaaagagtctaatcggaaaacctaaattctgaaaatctccgatatgagattttggacatcggcggccgccgctgagattctccgacgtgatgagcacgtagtgagaaagctcttgaaccctcgtgtgtactccaaactcgttaatgcattctctgaaactgaaaccaaattgagatcgctatgtgaggattcaaatcctcagctcaagaatgcggtttcagttttccaacaagcagtcgactccggtagctctcttgctttcgccggaaataatctcatggcaaagctggtacgctctagaaaccacgaactagcattttcattttaccgcaagatgcttgagactgatactttcatcaatttcgtgtcgctgagtgggttgcttgaatgttatgtgcaaatgcgtaagaccgggtttgcgttcggggttctcgcgttgatgttgaagcgtgggtttgctttcaatgtgtacaatcacaatatcctcttaaagggtttatgtaggaatctggaatgtggtaaagctgttagtttactgagagaaatgagacgaaattctttgatgcctgatgtttttagctacaacacggttattagaggcttctgcgagggaaaagagttagagaaagcattggaattagctaatgaaatgaaaggtagtggctgttcctggagtttggtgacttgggggattctgatagatgccttttgcaaggctggtaagatggatgaggcgatgggctttcttaaagaaatgaaatttatgggtttagaggcagatcttgttgtgtatacttctctgattcgagggttttgtgattgtggtgagttagatagagggaaggcgctctttgatgaggttctggaaagaggagattctccctgtgcgattacatataacactctaattcgaggtttttgcaagttaggacagttgaaagaagcctcagagatatttgagtttatgatagagcgtggagttcgtccaaatgtttacacgtacacgggtctaatcgatggcctttgcggagtaggtaagactaaggaagccctgcaacttttgaatctgatgatagagaaggatgaagaaccgaatgctgtgacttataacattattattaacaagctgtgcaaggatggccttgtggcggatgctgtagaaattgttgagttaatgaagaagaggcgtacaagacctgataacataacatacaatattttactgggaggactctgtgccaaaggtgacctagacgaagcaagtaagcttctctatttgatgctgaaagatagtagttatacggatccagatgttatatcatataatgcgttaatccacgggctgtgcaaggaaaaccgtcttcatcaagctttagatatttatgatttgctggttgagaaattgggtgctggagatagagtaaccactaatatattgcttaatagcactctcaaggctggagatgtaaataaggcaatggaactttggaaacaaatatctgattccaaaattgttcgaaattcagatacctataccgctatgattgatgggttttgcaaaactggcatgcttaatgttgctaaaggattgctttgcaaaatgagagtgtctgagctacagcctagtgtttttgactacaactgtctattgtcatctttatgcaaagagggaagcttggaccaggcatggagattatttgaggaaatgcagcgtgataacaattttcccgacgttgtttctttcaatattatgattgatggaagtcttaaagcaggggatattaagtctgcagagtcacttcttgttgggatgtctcgtgctggtctttcccctgatttatttacttattcgaagttgataaataggttcctgaaacttggatatttagacgaggctatcagtttctttgacaaaatggttgatagcggctttgaaccggatgctcatatttgtgattctgtgttgaagtattgtatttcacagggagaaacagacaagttgactgaacttgtaaaaaaactggtggataaagatattgtcctggacaaagaacttacgtgtacggtcatggattacatgtgtaacagctcagcaaacatggatcttgcaaagcggttgctaagagtgacagatgataaagaagaaagggataagtagggtgcataggcatgctcacttatgctaacttgaagactataaagtgggagaatcattgtgtattttgaatgctatgttggacatgtgaccgaagtgacagatgcaacaaagtatgactggcagacgagaaggatggttgcaaagaagtttttgactagtgtggtatttattcgtggtggagcacccaagctgcaatctgatgagctcattgcaaggcagttgttgcttcaattcgtgatttaattatctatggcatgagggtacgaaggcaaatagatttttacacattggaatgatgggtaaatgcaatgaagaggatcagatacaaccatctagacctgaatgaatatctcaatggtggttttcattaaattcagggaaggagcaagtgaagagggatttgaagcaaaagaagaagtacctgaggagagagtcataacgttgagagctttgagcatggaagacctgaaaggagcgtgtttgatgatcttgcaatcatgcacaaaatgctaattgttttgcatttgcatgttgctactagttttgcagaaggagaagggatgaacgaactcaagcagtggagatttgtatggagatgaaggctccaggataaatgtacaagtctattactataaaattcatccactcctattttcatcgtctcgtgcttgttaacattagttccggagatacttgtcaataggaacatgtacaaatgatttatctcttgtatctgaaattcttattataaaacgttttaactgtttatgtcttaccaaggtcattgtcatactttcacattatttattgtaagagatggtgaatgctcttgccaaggggaagctactctatagaaatttcatgtccagaggatccactaaaaatcttacaaagatcagcttcctgcaacatcttgcaggtttttgggaagagaaacatcctgaacgagaatattactttcattatctatcatgtaagacacgtctagtccctccagaaccaagtgataaacaatttcctcatccaatgtatcttgtggcttgttccgttgcgacattgatcgtatgtcccatgacaggacctgcgtgatcaagctcctaaactcatctgctgaactatatagagacttcttttcctgcgcgcatagcaactattatgttaaaacagtaaatggagaagagatgatcaggtcagaagtcactcactatcagtttccagcagctggtgatggatgaagagaaggtatctgagaaagtcacagaagccacagccaatgagcagtcctcctgaaattcatattcaatttgttttaatctttacttgtacctactcaggtaaggacgcagttactcacaatgatcttcaagtctcagcagtattcagttacatagacgaaaaacttagaaagatcaattcacaagaatgtacattacctttacccagtttggcactgaggctccttgaatactgtccgagtatggtaaatatggtttgatgtcgagcaccggctgtccaaaaccgtcaaaacaatcaacgaactactcattactcaaaaagctgacatgagtaagggaaaggagaattacagtcccatccaccagatcgacaccagagaggagaaccttatccttttggatttcctccacctaaggattaatcaccattaagtacttttggtcaagatattcaatatgtctttattaacaacaggaggaacggattacgctcagaaaaccttagcaacggtgaggccaatgggacaaggtcgatgaggggaccgcgtagcaaagactcccttccgttccccatttagccgtggcactctcacctaaattcacaacaccccaaaaacctcagactgagtaacatcataacatagaaacaaacaaaagaaaagaaacatacctttgccttgagcttcgactgagatggttttctccatagcttctcgatatcagtattgagatgaaacacatagagtatccagcaatgagaatactcttcaagaccctcaagagacgcaggaggaaccaaagccggatcaaagatcaaacatgccctcgcaagagaaacaagcaatggctgcctcggtgtcccgttcctgcaaaaaccaagaagtagcacttaagaagccaattattttaaaacagtataaagctcccctgaaactggaaagccatgaggatcatgttacctagtagagaagcaagactggatagtgccaataggtcgcatcgggtatattgtgctgtgtaaatcatgtgactcagtctgtgctaacgcctcccgtaaagcctacagctttcaattgcatcaagagagtgaacataaatccatagagatttcctccaatcttgacaagtatcaattttgatgtgcatttgaatgatttgaatctaaattcctatatttcagagactagtacaagttaaaaaaaaactcacctgctgagctttgactcgaccttttctctcagaagcacttttttccaaggtagatcccaaagacttctcaaattccttgatcctattctccaaatcttcttctcgtcttcgccatctatacacttcgcaagaacatgctcaataaagtgttagtttctcgaaaccagctcaataacaggtattgggaagaggaagtgacagagaggtagagagaaagagattacgcgagaaggcagcggatacagatactacggcgagtgtaaaggctaaagccgccgtggtagagccgtgggagcgtcctgatgtagccatagatgaactgtttgctgcgacggcgagtggaacgttgcgacggcggcgggaatgtatcggtccgggagtcaaatcggtttttacttttagttatgggagagacagttataataactgtaaggcccatataattatcaaatgcttaaaagtccagcaacggcccactgaatttgttggatttgcctatattttatgttctgtaagtaaatactaaacttctttctcaaaaaaaaaaaaaaaactaaaatttaacgaactatacacaactaaatttatttttttccatcaaacaatttcattttttttggtgtgaatccatcaaacaatttcattgaattcaaggcagaattaattgaaaacctaaacggaaatattttcttagaaattgttacaaaagtgtatgtttgattcttatttaagtgtaaaactctttaaattttgttcttttacaaatggcaggatttgacattttgaaacaagggaggatttacaaagtgtatgtgtttaacaacttaacttgcatgaacacaacattagatttggtcacagttgagagtagagaaaaccaaatgaaacttaattcattctaagttgatggagtgaacaaatggacaactgcagaccaataaccagccaactgcagttataaatagcaacctcacgatttagtaaaaaagcctttcatttatcaacaacactgaggaagtataagtaaaccatacctgagccagaatacccttccccgtttgagcttcgatcaccagccctatcatgagtcctatgattgcccatgctccgttaatagcctctatttcacgccttctctgtaaagcaaacgagagaataaacttctgtgctatctccacaaatcttgtatacaatttatcatcattcgtccagagggtttatttcctcacctgttgcttttctctgcctttaatctcttccatttgcttactagctaaccgcttagcctcaagagggtctaccatgattacctctttttttacctttgcttttcctggaggaggaggaggagatacctacaagaacactcagcatgtcagtaagtttaaaccaatggtcatatcatatcaaccaacaagaagatcaaacatgacatgagtatgacttggtgtcctgaacgaaaacactactaagatagcaaaatctataactgcaaaaaaaggttaatgttatacatttgggttcgctaggactcgtactactccaactctggctctgttgcccaccaactttgcatcttggtgtcttcttagtccctttctgatgaaaaatacatgtttataatgaatgagaagttgtctatttatcaaacgtaatgataacaactgatcaatgactcctaaattggataaaaccaatgcttcttcttcatgatcttattaccaacttagattaacaaatgtcataaaagaaaagaagaaataaagctggcaatggaacaaacacagggtatgtaagtaagtaagagaagagaagcagaataagaggaatgcttatctcatgtatagaataactatcaattcggtaccaataagtaaacttatccaaaacgcaagagcaaatattcacaacacaagtgtgattatgtgaaatgaaacagatccaataggaactaaaccgcttccaaactataaacagttcactgattacatttggatcttaaacacgatgatgaataaaggatttgaatttcaaacattactcatagaaagcatcttaacccaatcaacagagaagaaatcaaagtcacaattggagaaatctcaattacccaaaatggattctgattttagaagttcagaggaaaaacagagactttggtggcgagtaacaacaaaaatcacaaacccagatcacgaattacaaaaattacgaggcagaacactacatacgcttttcattccgaaaattcaaaacttcaaccagaataagagaacagagaactgtaatttgaaaaacagagtttcagagaaagacttacacgagagaagaggaaggaatagcaaaccttccattggaagaagaaaactgagcatcagctccaggtaagaagaagataggcggcgctgaagagaaagacgtcaccaccatttctaagcctttcgtattttcgcaacgtttttcgtctctgttttatatacacttggtctagaggatgaaaaacaaaggccactcaaaacgtcgtcgtttgtatttccacgaccaaggaaaaacaaaatacagaaaacatcccaaatcttatccaactaaagttccttttatgggtgatttgattatacacgacaagggactaactaaaccaagtgttttctgtgcaattagtaaaatagaatgttggtatatgtagacatcacatatttgtaattagtaatttacctttaagctaatgaattaattttgtggagagttataaagcttttattgattgccaagaacaggttgacatattggatatattggaaaatttacaattacatggacatgattggggaggtaggaagggcgagccagaggaggagccgttgtggcctattgaggtatcgagcttgccacgctggctcagcggtctcttgctcaaacccacttttcatgtatagactcttcgctgcttcattgtctaccgtcacatgcacgtacatatccgttatgcctgaaccatattcacaactctttttaaaaacttcaattgcacaagtctaaggagtttgatttaaatgttcttaccccattctccagcaactctcttagacttgtcaataagtttgtaaccaactccattacgatgcagctcttttgcaacacagacgttgctcaagtatgctctagcaaaatccacaccaatcccctataacacaaaatactcttaggctactcaatttgtccaatttcagattttaagttcagcattgttggcaacatcaaatagacaaatacctctggttttgttccagcaatttcatcaggaagccaacgacattggttaagatcaaggcttcccaccacaactctgtcttctatgccatcagagaactgagaaacagatgaaccatagcacaaatccatatcacagttttttctagaccaggaagtaacaatgacatgatgacaattccaaatgtagagcaccataacttaaatgcaacaaaccctcttgaacaggtaaatacaggatgaccaaattgagtacacagaccttacatgcagagcataaatcctcaaaagagcttgataattgcgacaatggaagggtagcatttatgcaagcgacccgcgtaaacccttccctcttccctgaagttctctccttaagcgcctcgaattcacgctctgccaagtatcttctatgatcctaatgaaacttgaacagcaaactgtaacatcagcataagaaacaaaccataaaccaaacaaaacactcactaactaatcacacaacaacaacgaagttcttcaaaactataaacacagctccaacatcaattatcatttcatctaccaattcatagtcaacggagttgacttcatgatacaacaaatagctaaaaatcatcttctaattcaccgattaagtaagaaactgacttggatattgtaagcagaaggattgagttcgttgaaggttcgtacgcggagacaagctgcagcccaaagctcatcttctgacaccgattcggatatgacgaaagtcgacttgtcgatcgctggagcacaaatgtgtgaggaagcagcgacgggacggaaccgtaacttcaatgaaggaatcgaaagatacgagcgtgatgatccatctgtgtttgggtcgccgaaaatggcgatagaggatgaacttgggagagacgaacagagaaacgccattttttcgcggactaatcacatcctcagcttcttgctaagcttcaaagctcgcatgtttgggcttttctattatttgggcccaatatgagcccatagttttctgtttgtttacgcttctttcaatttttatccgagagaaatggcagccacacaaataccaactaaatgtcataactcataaacaaaagatacgtaacaaacttttaacgttttatttcccaccaaaagaaaatcaacatgtgtcatcatcactcatcatcttttctttcaacgacaaaaaataacattgttcttatcgcaacaatacatgttttatcatcatcatttgaatgtacgtaatcaatgtatctcgattctttttggttgatatagaaaagaatttggagttgtattttgttacctaataaaaatcaattaaaattaataatagtaatctacaccctcgttaagagaagcaagtagagctagttcatgcatgatgatgtcttagtaaaagaaataagattatctcatataaagtaatagttagaaagtgtggaaggattagaatgaggatgatgatgatgtgtgtcatgagtcattgatctttgtcattatcctatgattcatatctcttctttctcgtgcatccaattcttattggtcaacaaataccaatagaaatcatttcagcaataatggacagaaacctacttacgattggtgggagggatacacaagaagacaactagagtgactaactataacatgttcacgcatatgatcttttatctattttcataattctgatgtctgtgaccaccttgcaatacacctgtacttaaatgtagaatatacgttataatattcgtaatacaacgcatcacataggacctaaatggcgatttttatggttgcatagtttcttgaaaaatgttttattttgttgatacgtattcaatcgtgattgtcaagagaatgaaatatcatacagtgaaatcaaaaggaattaactaaacaataattggtagtcaaatcttaaaatgctatacgtataattttcttctttaatttttctttttttcttttttattttgtaagagatttctttgaacaataattaattcaatctttccttacgtattaaacaatgaatagaaaaaaatcacaagacattattgaataaatgtcggattatctactatatatgtgtgcgcatgtgatatagtactgtaatagtgggctacaggccaacttcggctttccaagaacatggttgcatcgagcatatctttgctagattttaaatataactacaacttcttgcttactttgtgatgcggaaactcaaaaccgtaatcactcatgttatattttttgttgttgctttcaacgctaatatctgaaaccagttttcgctggtctaagatccatttgcaagaaatgtcaacaaaataaaaagctcttatcattcccacgagttttagttaaggtaatctattattccaagacttccacgaaccacctatatatagaagcttacatattctatagacttaataaatgtatagttcaatattatgtcactaacgtacgcggctaacaggtttgttaatccttcctatcacatgattgacatacacacacacacacacgcacgacacattatttgtattcagtattcacatatacgatatataattacaagagacgtgtatattgagagattcattttttagtgattgtagatcttaagagagagagagagagatggagatatcgaaatacaaggcggtgctagcgttagtgatgttgcagtttacgtccgccggagttgcactcttcacgaaagctgctttcatggaaggtctcaatcccaccgtcttcgttgtttaccgtcaagccatcgccactctcttcatctgccccatctctttcatttccgcttggtaagttcagtgtttttgaaccaatctatatattatttatcacatgaattctgactcatttccatgtgaatggtaattaggaggaaagaaaacaaaccttctctgggagtaagaggcttttggtgggtggctttgacggctgttattggtgtgactgttaatcagaacgcttatttcaaagggattgacttgtcttcttcatccatggcttgtgccatgactaatcttattcctgccgtcaccttcattatctccatcattgttgggtatgtatcatcaacatatatgttctaagattctatattgatggattggttatttattattgatattggatgtttgtttcaggttcgagagtataaagaggagaagtatgaaaagtgttgcaaaagtaataggaactggtgtctgtgtgggaggagccatggcaatgacttttctcagaggtccaaaattgctcaatgccttgctcaaccaagacaacacagcttggttactcggctgcttcttccttcttattagcacatttgcttggtctctttggttgatccttcaggttcctattgcctctcactgtcctgaccacttgtacacttctgcctgcacatgtttcatcgctaccatagcttctttcctcgtggctctcgccttaggcaacactcatttaccgccctggaagcttgattccttcttgaagctctcttgctgcatatactctggattccagttggcgatatctttctttctacaagcttggatcgtatcacagaaaggacctgttttctctgccctcttcaaccctctttctgcagtcatcgtcactttcttcggcgctctgtatctaaaagaacagacttacctcgggaggtatgccattttcttactatcctctcttcgttctgtagctcaattcacatttttaaatctgttttgctcgtttctgcagcttgttaggcgctttggctatcatccttggtctctacattgttctctggggcaaatctgaagactatcaagaagaatcaacagacctgaaattggaaaatgaacacaacacttcctctcaatctgacattgtttccattatgattggtgataaggcctttcgtagttcggagctattagaacctcttctcatgtgagttttattgaagtcagttctacatggtgtaagtggaaatttttgacaatggacacttaaagaatatgaaaatgataataacgcaaagtgaaatggaacttcttttacaaatctcactcgtctcaacagatgtataagctactcaacacacaaaagagtcgaaatagaagcacaagcaagtgcttttgtaactcattatgttgcaaatttaagagagaaaatacattgaaattgcaatcccccacacacaagacaagcgatcaacgagttgtcttaaatgctgctttaacttacttgacagtaagatgatgacacttcagatatcttctctggccttagtcttggtttcaacgcattagaatctattaccaactgcgtttcctgttgttcctgaacgcacaacaaccaacagagtagacgataatgaggaatatgaggaagacaatgttgaccttagccacctttttccatgagttcttgatgttgtcaagcagaccagccttgcaggcttcacagtcgtagcagagagttcctggtttgttgtcccacacattacagtcctcgtttttgtatggaccaggagtctttgtccaagtagtcgggttcacataggtgaagttacagtcattggacggcttacaacaaccagactacacaagtaaagcaaacaaaaagtagttagtaaaaaacatcactattatttctaaagactaaatctttctaaaaggctttgtgtgtttgtttccatgggagaaaaagtaagctttttgttcataaaacaaaatcactttttgaggaaaaagcaaagttgaatccatgaatctcatcaaaaagctagattcacttttaaaatcccgatctctaattctaaatcacagatgaaattttttttaaatcagatcaaaattgtgaacctgaagagcattaagattagatttgtagaaatcttcaacgttaatgctggcataacgagtacgataagtggagcaaacgtcagagtacatcaaacaactcctgatccgttcccaattcttagcattgttgacacgtttctgcaaccaattagagtaatcggcgacatgatactctttataccctcgatccgatataacctcaccggcgccgcggtttgtgactgcgaaagcgaagattgtgaaacagaagccgaggagaatgaggaggaacatagcgaagaggtaaagccagaggaggcaagagacacggcaacaagcaccgacgagtccggcgattgagacgaacatgaggaagattccgagtacgaccattggtttgtcgaggaaacgttcgcattcggttgctgcatttttgccgagccagatcccggcggagagaattgggattgagaggaggaatgtgaagaaattgaggattccgaggagattgttgctacactgaaccatcgctttttgttccggcggaaataaaaatgtgatttttttttctatctccgatttcagatcttattatgcaaaaaaaaagaattgggaactttgtccgttacgaaatctgttgggacttaaacggaactaattggttcttaagacagctagacaactaaaagttaaaatcttttgctatttattgtttacaccctttaagttgttggaagtgacaaaattgtctcgacaaataaaattctgacatgatgaatccaaagaatgtcttgttccaatttatttaattgatcatccaaggaaaaacgattaatgaaagacaagagttatagatttcatgatcatccacacgaccttttttggtctcaaacttaaaatgaaaaagagagattcttgtgtgaatcaaagagggccagggaatgttccagtctccctctgctcattccacttgtcaacctgcgagaagataatcacatatcttgttaagaatgtgagtagctagtgaagctgacggataataaaaaatgaaagtacaaacccattccccagggcagagagcgcggtagtacttggcgaacctctcgcattcatttgcatcctcaccttttgcagttgtgcacctgcacagatattgtttatgttattgttgttgaagttagagaatgaactgaagagtcactaactctatcacacaagagtacctgtggaactcaatgtaacgggtgaagcagtgcctcgtttggtttgttgttggaaaccgaaaatcagcaggagcagttttcagttcaatctaaattcaatagaaacaccaaaacaaacagatttagacaccgagataaaacccttggttttaaaaagcgcgctaatggcgtgccatggcgcatagcgcaccgatgctctaagaatagggcaacaagacgtggaggcgaggcgacatctatgatgcgcacgccatacgtgagccttggccgatgcacaaggtggcaaagcgatcgcctcttgtgttcaggcgaaaactcttcgaaaccaacaacagaattctgtgattttagggtttgcacgaagaaatgactaggaggaataggataaaccattttctaaacctagctggttaatacatgattcaatttaagtggtttggtagcctaatccacgactagaaagtttaaccatgtgttataattagcttatcaaaccaaatcaatcctaggtttatcttaaactaaaacggatttgacccttacctcttaacccacgacattttaaccagttagaagatgtaaaatccctaatttttctaaatagaacaccatagacgatataagcttgaaggctaaaaccatatgcagagaatctgttaagagaacgccacagatccaaaaagcgcgcgctttggtgagccatggcacatagcgcactaaaggactctctgtgccatggtgcgctttgtgccatttaaaactcagataaaaccataaattttcctagtgagtcacgaagatggagaccaacaataacaacattttcttttagacttcaaagatccatcttttcttctctttcagttcccaagtctactaaaaaaatgccaaaatggtttgacagagaaactctattatacaattccagtcgagcaacaatagaccaccacgcctttgagaaaacgatttgacggaaaatcttccatcacttttctacaattctaatgaactcatatgtctttcttctctatacaaacactccaccagatcatctatagaggatgagtggaaaaagccagagtaacgagcagctaatttcacatcaaatcgatttccatcaaaaagaaatctaatgggtatcaaagttaatgtaggcatataagaaatgatcaatcagatctcgaataaaggtctccggcaaattataatctccggcggaaaaacagagctaaatcgtgtttataataaatatatacgaaaagatgtaagattacctcgtcctccatggctgatctgaaatgaatgatgagaaactttggttgggtaggagaagaaagaggagacgcagtcgattgaaaatgaagtttgcaaatcgccaacttttctcctccggtgacgacgactagaagaaaaagaagccaatgaggccgctttcattgttgggctccaatactaatgggcctaagttcactttacagtttaaaccgattcaatcggttattatcggtttagtcttttgttgttgaatctttctttagttcagagagtctgagcttgagcaggtgcgagtagtgaggaaggtgcatcgcttcgattcttcttcttcttcttcttcttcgttgaatccgtcatcctccgatcactgaagaggtttccgattacctttctctctctctcattctcattctcaccatgcgattgcttcttctctcccttcgccgtgtaactctattctcgaggcatcaacgatacgctttcgctcccattcataattgtttgatctctatcaatcccagcacatcttcttcatctctattctcggcttcttccttctgttcgtctccacattccaatggagatggaaagattgcagggccgttagtggagtatgaacgcagaatcgtagctggagagttattggatggagatttatgtcaggtactttccttttatggttcattcattagcagtgaaatcgatttttgaatcttttctttttttttggttgcagctaggtacactaagagaacttcagagactctacgacgagcttgttcaatctgctgatgcttgtcgattggatcgttattctgcatctgcaaagtccactaggagtaattggttctggaacaaatttgtgtctcactcttctgtctctcctgtcaaaggcttatacttatatggaggagtaggaactggaaagacaatgctcatggacttgttttttcatcaattgtaagtaggtggtcactgttcatatagtttctacatttttttatggattcatctgatcctgttttaaatgagttaggccagctagctggagaacacaaaggattcactttcacaatttcatgttgagtgtgcatagccgcctgcaagtaaactcccagttcaaagctttattttttaagcttaggcttgcaataatcattggactcaattctttgtgtatttgaatatcctctgtagaagcacaagggtcttgaagatccacttgaagtcgttggcctggaaatagctgacgaggctatattactatgcttagatgagttcatggtatgtctttgtgacgctcgtctttattgttttaaaatgtgttcagggaaaactcatgtttctttattgttcttcatgtataggtcaatgatgtagctgatgcactgatactaaaccgtctctttagacacttgtttaacaatggcattgtaagtaatctataaaacctttctctttctcaactcttctagcctactggacctaaacctatagttatttaaaagtttttacatgtcggtaattggagaaaagtgtagattcttgttgctacatcaaaccgtgctccagataatctctatgaaggtggtttacagagggacctattccttccgtttatttccacactaaaggtatacaaatgcaaatgcatgtcactatcaacgctctgaagaacttgtttcatgtgatccattatgcttcgtaactgatactgagaaatgatttgttgtaggaaagatgtgtcgttcgtgagattggctcatcggtggactatcggaaactgacctctgtacgtgatttcacgtctctcagtaactgtcttagttttgttgcaaagtgattacaatcttatagctatgtattcttgggtgcaggctgaagagggattttacttcattggaaaggatatctcaggccttctaaaacagaagtttcagctgttggttggcgatcaaccggctggtcctcaagtggttgaagtagtaatgggaaggaaattgcaggtttctttgcttcttctttcacagatgcatcaatatgcagttcttcacgattttctgctgaagagtgctttattgattgattaggccgaaaaccttcagataccattccattaaatagcttatttgaaatcccttgatccttatttctaaatttattgtttgttgtacgccaggttcctctagctgctgatggatgtgcctactttctttttgaagagctgtgtgatagacccctaggcgcagccgattatctcggattattcagtaagtcttaccccagtgccttcagaccttgtcattgcactggaattcttacatgatgcttagtcttgagatgcaaatttcattacagagaaatttcatactttggctctggaaggtgtacccttcttcgggctccataataggactgcagcttaccgctttgtgacactggttgatgtatatctcgcttcatctctcttttctacgttcattctctttttgaaaatttgctttctcaactgctttgagattacttataggtaatgtatgagaacaaggccaggcttctatgcacggcagaaggtagccctctagaactgctggagagaatagtgacaatctctgatgcacagcaaatagcacctagaacctcttcaagatcaaggaagagtgatgatcccgacctttgcgtggacaacgagcttggttttgctaaagaccgcaccattagcaggtatgatcgagcaactgttggttttacactgatttatagtctggactgatgatctccaatgcgcgccacagattaacggagatgaacagcaaagaatacttagaacaacattccagaatgttgcaggagaagcagccttcttcttagtattactacaatgtgattagagatgctgtcaaacctgttggaaccattgttactgaacacaaggcctcataatgtatttactctctgtgtttgagcacagacccatagttttcttgcaagttgatcatgttctcatcagtaaagatttttacaaaatctaaccctcaagacatcaaatacagggaatgaacattcagggatttctcctttttggtggccatgagctgtatcttactattgatgtctatactccatagtaaatcgaaagaaaaacaaagggacaaatcttttattaaggagttgaatatatctagttttcagctatgaaaccaaaaactgaaagcaggagaaaagttgttaaagcaggagtgacgagccttggtcctgcgctacaacacaaaacattcacatgtaaaaatgcttttctcgactatgatgattgtttacctttaacctcatcaatggagccaaaatgtctccgcattcctttagcctcaatgttaatacttcagtaacagacagttgcgtcttcaacttgtaacttcaatttgctcgatttcattatcgctgtaatctccccagcacttgcctccttgtcgttctccatttttctcatcacaagtctcatgtgatgtggtttccacttcacctactgtcgaatgtccattttcaggtgtatctgtagtttcttgtccaacggcttcgtcatcctctccagcatttttgtcgttgttgctttcttcttcgcttccgctcttctcctcagagcttccagcaccaggtaattcctctgaaacaagtccatcctgaggctgtgtaacggacatgttacacggatatccacctgctactggtgacaaagggtacccattctgtgttatttctgcaccatttggggatgctaaatagccatttggtgacactggatacccattagaaacccaaggttgactcggtatgaactcagcagcatgggggttcattattcttgggccattgaattgattagcctcaccattggactcggtgctattggggaagcttggtttgttacgcggaaccctgtttccagatcggttgtaaccaccaccagagagtctaggcccataaggaactcgagctgttacagactgatgaggagttgatctgcggacatggttaataggaagcattggtggcatattcaatggagaggggaggattccaccgtggtctttgaatcctggaactgcaattgatccaaatattggaatggttgttggggtatacggcggtgcagaagcagagagcttcttgctcatctctttttgtgcctcacatgcatcttgcttttctccatctgcagctactgatgactttgggcttgagtctccattgggcagattttcggtttcaccatctactgttttcagttcagcatcacataaatccttttgaagcttcactccaataactgattcactgccatttgaatcatttgctgttggtgacttattcaagagacatgtatctgaatcctcagccatttgtgcactcttagattttcctggtcttgcatttgatacggctgtttctattggaaatgctttttcagctgccttttcgacctccacattcttgatttcctttggagaactagtcaactccgatccaccaacaacaactcttccttgttcattgcaatcagtgttttccgcttccgtttctgtagccacatgcttattctcgctctcagcatcctgagcattaactttttcaggaccatctactgcaatttttgccgcatccaaattctgtggggcctttgtttcttctggcaactgctctgcaactatttttacaatcgttccagggggagccagtgcaacctccttataggaaaacagttttccagctttgacactcacaggactcaacatcggagttggcttgttgatctgttcagtgcaagctgagcttgccagggctgatttatcgttgactggtctttctcccactacactggaattgttttgctttttgttcaatgggctctttacaaacatcttcgaggctggggaagaagtggaaccagcaacagaaattgaaagctcattagaactggttcttggggatgtgaaattggtggattttcctctgcttcttgatggctgctgggtcacgttcatgaagttggtgttcagctttgccaggctgggccgtgttctacgcccagaagaaaaacgatttttggggacagcttcttgccatccttcgtcagaatcatcatcttcgtggaccgtggcttcgggcttaaccagcttcagctggtcttgaggttttgattgttccaaatcaaaattttcaacctttttttcttcagattttgtttcggatttgttctctttatcacttgaactctccccagtgagatgagccggactcaaaatttcatcatctttctgattttcttctgacactggtcctggactttgacctggctttcccttgacctgaatgaacattgcaagaaaaatatctgtcacgccttattaatgagagtggttcaataaaaacaaggattaagtcagcgaaaagcaaatttaacctttgggcgagctttcctttgagcgtcccttgctttaataccagaatccggggttatataatccaacaggtctgatacactgttattgggaagaaagctcattggttatatcactcaggacaagatttacgcaagatagaaatttgtactactggtctaggcaaatggtctgcatttaaattttcatttttggtagtcagttctattaatatcttttggcactcatttccattttgtaaacagtgctataagatggaatgcaagagtataaaatcatatatttaaaagacaaatgttttatgggtaatattagaaactaactatagaattgaaaagaattgagtaactaaccattgtcagtttttctatggataaataactatatgacggcataagaaagtacaaaactatccttgcaagttgaaccaaaagtaagtttatgcagatatatttgatgttttttagtaaatcgcatgaaacatgttaaaatgacacgatatttattaaaaagtgacattttttataacatacattttacacaaatagcatgttatataaacaaaatatcatttcatttgaaaagttgaaccaggagcaaacttatacgaagataaaataatagatttgagaaagttttaacatttaaatcatgtttttagaagaaataatagatttgagggtgtactctgacatcatagctattttgttaattcttttacaatccatagtcatctagtgcatattctcatgttttaatacctgagatggcctttgctggaaatagaggcgtctggcttgggagtaccatttcgtgcagcttcttgctgttccagagctttggactcgaaatattcaagccacgcagccgcatcctaacatagttttagaacgtaagaaacacattttaactgaaactccctgtaaatcataactaattaagcacctgtgtccgaagatcctcagggcctagttttgcttgtagaatctgtagagtggtctgctcatgttgaacgctcaaggagtatgcgtccatcagagaaagagcaatagcaatggcatggtagcttgcagcagtctgaaaagaaacataacagtagtgaattcatgttttagcgtatcatttagcttccatggtaaattttacttattaagcctaagccttcatagaatgggaattcactgtcaaaaccgatatccataaccttcatatggtttgactttcaaccaactatttttactatttagtcttcgttttccgtggttaggatattgcagaagatttttttaagtttatggatatcggtttgaaagaggccataaaattgcaatcaatcaatgtccttgcttaagaaaaccaacctggatatgatcagctccaagtagtctctggttacatttcaatgcttcatgaaggtatcttaaagccacatgggcattcttcataccttcttccatcattgctacgtttatataagtggcagctgtatttggatgtgatggtccacatgttagatgcaaaagatacaaggcacggttgacatacctacgaaaaggaataacatgttagcaaaccgaagcaattaaatttgtagtagttggcgctttgggaaatgcaaaaagcatacttcaaggctaactctgtgtgctgaagacgataatagaagacagccaggtcgccgtagcttttcattgtgtctgggtgatcaagtccaagttccctttcatttatgtcgagtgctttctgctgataaatggtagcctgaaaaaacaatactggttagtgctgtctgctggaaacggagtaggtgaaattgaacaatgtcttggagacggtccaaatttctttcaaagagaatacctggttaaaatccccagtatggtacagcacaacagcgagaagactatacgctccagcggtcattctatgatatgggccgcacacagctacaagcttggccaatgcctatggagttcatcccagaaaatcagcttagttagaccatttgaacaaacataaatacatccatgtaaaacaaaagtttcagaaacaaaattatccttgcccatgaaaacaaaacacagtgattcaatacttgcatggtgttgataattcaaacacatttaagtagttgataagaaataaaagatggggaaacttagaatatgaaaaacagtgttctattcctttggttctttcatagaagaaaggatatatataatgggtgacaacagaagaattagtattctggataactgaattttgggaaagaagggacaaatgtatttagactactcaagagaaagcatccgttacatggttagtatataaaaagaggagtgagaaaaatatcagttataccttggtgccataattgacagcatcctccagtttgcctttatctaaggaggttttggatgattccaacaaagtgcgcccatctgcggatgaacatgctacgtgctgcacacaagagcagtgttcttaagtaactgaaacaaatcactgtttcattatagctgattattacagtaagatcgttatgcatggtaccttatacacaggaaccatactgataatatcaaacttcttaaaaggataagacgtgtccatctcatagtctttaggaacaagctccagtccaacctgaaccgatgagtaatgcaacatatgagaatctcaggttagatagtcattattgaaaacaaatttcactgacagttgcaaaccttgtgtgacagtcctctaagaatggaaaattttctcagttcctggcagccttcatgcttccaatcccacccaaacctcttggaaatgaacgtttccacccaggtccacttaatcttttcatcgtatacactctcagtgtcagacggtgtccccaataggacatttaagcatgttgctattgaggtggccacatcagcggtgttttcaacagctgctacaacagcctgcagtatatgcttgtacgcccgaacaatcatttcatgaacacagagggattgcacatgaggaagcttttcagccagctcgacctaaaaagagaggagaaaagagtgattcctaaaagaaatggagaactttgcttttctctacgtaagcacattctaccatctagtttgacgagagcgggttccaaagacaataaaatgaaatggttaccactcttcccaaggaatgcatttgcaagcctctggtgtgcataaagtctgtcagagttcttccatcgacgggtgagagttcaagagatccaaagtctgccacctgcaacatatcaagtctaaatttatgaggaactgaggattttccctaaacaggacaaaagagatcaaagaaactgaccagttttggaagagcagtgtcagtgtaatatttgcgggccatttcaatcagctctttgggtgactgcagaacaggttcatggagagggtgaacacaaggtaagattcattataacaaactaggctaaatagataccagagatttatgaattataacttacaactagcctcaactataatatcttatccactgaagaaacagacaaaccttgagatggaaaccagtttctgattctttaaggcgctgatatgcagtttctgtcaccagttctttccacatcttttctatttcctcgttttgtttctcgagttccttttgatcctcagtctctgatgtattgtcagtgtcattagcaggggcctctttgccctgttcagtcttgttagctttcacatcgatcttcctttttatctccttcagcagtgcaccttgctttccaagacccttgacagctggttcaggcttgggatcttcagttttcttagactcacttttacttgaagcttgattttgcagatgttgcacccaacaggctcctaattcccaccttatcggcttactatatcttgagggctcaatctccaatttcttcaaactatcctcgattactttcctcacaagagacttagccacacgtatttgttccgagtctgcatttggtgatctctgtgctaagctagaaggcgttgacgacttgtgcaatagagttctcaagctgtaaaaggatttccagaaaaaactatctgaatagtctatttcaaaattcacatatcatatgccaaaatgtcacaaattgaaaatttagatcatgccagaagccatatgttcagcaacacagacgtgaagtaaatggacatgcctttttgattgaaatcgaagccaactatgagcaaccattaagaccaacgcatatacaacatgcaaagattttacctatttacattcagtgcatttgcacctccttcggattggtcttcaatgtcaatatcctgtaggatatggccatcattcaacttaaattcagaagcaacctttacaatggctgtacaaccacaatgtcttacaaccaccacccccaaagtagacgtatcctatatgatcaaggtaaatctcagtaacaattccagtaagagcaaagctaagaaaagcagctgaagctagcaaaattacatgaactgtcgcactctcatcagcagtgatccctttaagcaaattcctttgagcaagctcttcctgagaaatctccagaacctgggtcccatcgctcttccggtcaagcttggcactggcgtcaggatcatctctagccacccttacgatcaaatcacctattctttcttcatggaaacccaatgcagcaggatccttaagtgagcattgattattctctactatcttttttattatttccactgctttgaaaactgaaacgtcgacaaataaactgtggagtagaaaggccttcctatctcgaacctgtctctcttcaggtgttttacaaggcattgctgccaaaatggcaaattccttagcccactttcttttgtcatactttccagaccggcctaccccaccaccatcccctccccatgtctcatcctccactggaagtgacggaaaagtagatggactatctgcaacaaccggaggaactacccaagtgtttgcccggaaaccataaggaaggttgccaaactgaaaaagaaccaagaattattacatattgaagattcctataatcaactatagacaccgatataaggtatacttgcagaccttattgtgctcaatgaaagctttcataagagcgtcataagcctgcagccacaatcaaatatcaccaccgaacaaaaaatagaaccaaaaatgtaaaaaggtagactttttatcaccaaactgaccgcatcaaatggccggcttatctgttgcagcagctcaaccaaggagtggcacagaagttgctgtttcccaggtggataaaaacctgttcttgaagcaacaaccgtgaacggcttcccacttgaaactttaatctgtatttgacaacaatggcttagcacaatttcttaaatccaaagtatagcttcaaatgagaggagctcttacatcgatttgaaacaaatcatctaatcctttatcctctttggatggacgaacagaccttctgatgtctgaaaattattttgtcggaatcaataagcaggatcaacctcaaaattcgattaacaagcgaataaggaaactcacattgaatcggaggagtaaggtaggagaatgagaaaaattcgtaaaattgtccgagacgagtcggtgggcacatgtcaatgtcactcttggccgctccttccgccgactgagcctcacatgcgccgacggatttcttctctgattccttaggtttagggctgagaccggaatttgaatcaccggcatctttttcggtcggagaatctccatccgtcgagcctgactccttcttttcagaatccttaggaagcgtacgagacaccgggggtttcgacggaccaaatgcggtggtgcaagcgacgatgtcgaggagccgccgtatgtgcgcggtggcttgctcctccgtatagtcctctgcgaattcaaaattaaataatcctctgtgggcaaccctagggaagttatttcaactggagaatgtagaccgttagatcaagaaagagtaccttcaacaatagtgaggtggcagggcttgagcgatacgatgtcaacggaatccttgagtttagtgccacgcacctgcagcaaaaagaagtcagtctcacttcttctttaggcggtaaattgtcagataaagcttactataaccgtcactatttgggcctagggcccattattagcaaatgttgtaaaaatgtttacatttttttagccatgaagaacaaaagccacataaatgttgattgaagaaacctggtgagagagagagaagttggtgaagtggcatgtctgaacatggaccgccaagagcttcctcacatctaagattctgtctgtggagataccctatcataacatcatcatcatcacaattcacaacatcatcatcatcaacttgatagagaatcatattcattggcttttgagttataaacaatttctcaatcaatgttttgttatttagtgttaagctcatcaaaccttgagtgtcacttgggattcatctggtgtttcaacacttatctcaatgacagtgggcaaaactgcacaaccacgcaatttttttaatgttatcaaataaaagaagagctaaggaagcaaaaattgaattctcataatgcgtggagaaaccaaaatgaatcttaagataagaaaattttgaatggtattgaattagtttgtaatgagaacctttctcttccttcttcttcttctctcctttactcttgtgtggctttgttttccccgctttaggagccattaccaattcacataaaacttacaattctgaatttgatcaagaaaactcaaaattaagctagccttggattgaattatatccctaaagacttggcaggggaagtgtgtatttgaataagtggagatgaagggtgaggaagaagaagatagaaggaaaaaagaagagagaagggtgtgtgtgtgtgtgtgtgtgtgtataaatgagggactagtggtggtgacaatgaggaagtaaaaggaaataagatacgagaggggtcaaatagtgattgagaaaatagagatagagatatagagagagagatagaaaggataggataaggtgcgaggctattctctcttctattctccttaagagtgttttgaggctaagtaaaattgagacctctcatttctttgtttgcttctttaacacctcatcaccaacttcatcttttcttctatctttctatatgattttttccttttttttgaacaattgaatttaatttaatgtttcccccttattttcatcattttttgagatttcacccatgactttacatatcttattatcaatttattttagtttattttacagtatggatcttcgtgtttatgaactttttggctcttttgggctttttttgccacaagattattaagcataaatttttgaattttcaaaagaaaattataaacaaaaagtttcaaaatttcatttgtgtagtttttttttttttttaattcgtctagattagtcttttttttgtttatttttcttctttaattctatttgcatggttgttaccgtctacaaaataaattgcgcacttcatcgttaaaaacgatttcaagaaatgatcgttattttttttttgaaatgatcgtaattggttcgttgacaaacatataattggatccattcatgtgcgctgcaacttactaacatacatctttgggtagatcttttcgtcagaaacactttatttccggattagtattggcaaaaccttagcgagcatttatatatgtagtcttcaccttcgtaaaattgtgaatggcattctttgacaatgatcattgcataacaccaaaagtttacatgtcaaagatattccctatgcatgatacattgatactcatgcttggaactaagcatccaatataagctttctaccatatagatagatctttaatttatcaacgcaaattatgtattgtcgaattttccgataccgtacatccaattattttcttcttcgatcgatttataaattacaatgtaacatgttgctatgatatcaatcgttaggaattttccaagagtctgttaggaagtatcacatttgttaggatcggacacgtgccatcatgtgactttgcgttatgtttctaatctaacaaaaagcctagcatatagagaccatgattagtagagacgaaccacgtgagggctccctagattttgcttgagtctttgtctttttctctttttgaaaatccatttttacgcgtatgaagcctaaaattgaatgatatgcataaggcatctagctatctatgtgagaaaggggaaaactacttgacagaacgtagacacggggagcttgagcaaagcaataatatatgttcaaggtgacatagaatccagtggataaaacctaacacaaaatgatacattgatatgggccatatggcccaacgtgtatgaaatgtccattttaagaaagaaagaaagaaagaaaacaagtagtatatgcattgacaaaaggatcaaagctggaagaaagaaacacataaggtggatgagtcaattttaaacagagaagagacatgtccaattgcctagtattatatttcgctacaactcttttttacccccaataatttcaaattaagatgactacatgattgaattcaagtttcccctctccatggacctaggcaatttcattccacaaattgttattaatccttcaatatctgaaaatcattttctatctttccatttttccacgttttgtgcttgaaatggctttctatatcaagattggtcaagtctgcaacactatagctgcccaaatccacttggctggagcgcgtcaattaatattgtttataacacacctaataagacttaatcattaataactatagaacatttcttcttcctaatctttatatatgtaatactcacatccatcagaattaagcaaaacgcaaaaaccaaagatgggtgagatgatcaaagccagacgcatactcctcttctccatcgtattcctcttcttcttctctcaggcctttcttttgtgttcagctgagggtgagcatggctcaagaaatctcgcagtggtgatgaagaaaagggtgaaatacagaggacctcgcaacacaacaacatcctctgcagcctcaactattatgttcccaggctccttccatattggtgctgcttcctctttactccttgctcttcttttataagctcccttgtagtgatcattattgtactgtttgacaatgattcatgtaatttgcttttctcgattgattttgtagaaatttctcaaatggtctaaaattctgtttgtaaattatttgctctgtttcagtattgtgaaagttaataagatatttgaagctaacacaaacaaaaaaagcagtcggagaagcttctccgatccctatgtttcattccagttgtttcttatctataagaaaagtcaaaagtatatggtcacttgtcccacatctctacgtatttgtttcaccttatcacaatcctataaccaagtcacatagatcttactacacatgcaaacaattcatcacagaaccaagctgcatgattctaaaagcatctcttgacaacctggttgctacagctgtgttgatcaaaccatcactccaggtcacgatcgccccagagatccgcagtatccgttcatgtgatgcgtgacaaaagagtggttcaaaaaggttgattggagaattttttttgtttttgtattcattattgtaaatttgtaattatctattaattgttgagagttggtcgcacgaaagtgtctttccaacatgtgtcgcctctacacgtaaccatcggaccttgaccatgtttttcttattttttttgtaaaacatcggacgttgacttctggaccgattctatagtttttctgcttaccaagtttttttttcttcttatttttgattaatgattatgatgaaaaagagaaaaacaaactatgcacactctcaaaacagaagtgtttaatttttttttttttgttattaaaaatcaagtgtttattcaagaagaaaagatctcaaacatgttgagagaaagatgtaactttaatcaattaatggaataaatgaaattacaaagagcaaagaacaagagcaaacgaataaaatcacggtgactgggcatagaaaagtggacgacggtactcatcgaaaaattgatcacgatccacgtacacgattgcatagagtgcgtagatgatccccggtacgtatcccaagagcgttaggatcagacatatcatgaattccgtctgcacgtcaaatatggacaatttacatatttatgagctcttgattcagacaaaaccaagattcagagataaagaatacttacagtgcaacagccatgcctcagacaaacccctagaggagggatgagtatggcgatcattatttcacagcaaatctcgcacccattcgccatttctcaatgttttgatccttttatttagttactttgtttgatccaaaggacttcttatataatgggaagagagacagaaagagaaaacatagcctcaaagcgacagcgtttgaaaccaattgaaaaagaaagaacacaaattaagaaaagaagaataactattcaaatgtacaaatatttcttcttctttttttttacaaagatgtacaaatatatattacttaagtattaattgttactagtacaaagagtgaagctatttttaagctctttgtgttggattgtgcagaagatattctctcatattttatgtcatgccaacaggatctaaggagtgatgatggacatgtttttgttggaggcccgaccacacaacaaagcattctttggcaaagggtattcatctttgggagagtgatttggagaatgaactcgaaggtagaattgttgacctaagtattgtctcgcccagaactggctccttagattccacatccccacattgtccaatgccacatatacagctgtccaagattttggatatacctacaacaaccaaacacatttcaaatttatgatcaaagttcttcatacttttttattttgtgcctagaagagatatagtgaaattatacgtacttgagtagtggagcgagatatagcatccttgaggttatactctcgtctgctcgcacgtgaccatattcctttattgatcctgtggacaactcacggacgtcaacgaccatggacgaattcatatgattctcaaagtatggtttagctataatgttctcacccaacaacccaaaagttgtatccatcgaggtggtaactttggacgatcttctcgcggttttgaaagatgatctcaagaaaagcattgtggtgtgctcccatcactgctgtgtctagccttattcctcctcctcttctcggcttgtcagggatggttccaactttaaaaacatcttttattttgaaatgatccgcaagcttcagcggagtatccgaaggcacgaacgatacgccatttatggcatagcgttgctttcttttcacaagagccgctgagctttccaatattaaagtcctagaaatcttcattttaccataatggtatgagccttgagggttagtccttggccccgacgcagttaggttggtcctaatggactgggcttgtttgatagaccattctacatcatctggatcaggtcgtcgcgcagtgataatcttatgacctttggagttggagtagtggagagtggctcggatcacaacttctgcgttgataaatcttgtggaaacgacaatggaatagttttgaggaggttggtccatggtgaccaagaaagagtaagtttgaccaacatgaatgtcgagtgatgtgtacatggtttggaccgtgtgggttccttcgacctcaatgagcttaagctgatgacctaatatttctaaattcagggaggtttgaagccctacatttgatactctgaatctgtacgttttacctatcaattgatccacgaaaagtgatgtgagaatctttttttttttgtaacttgtaactaacgtaatatctagagtttttaaattgaacctttgtcgacggtgatagaataaacagtacttactccctggccattgatcataaccccatcaggcattaacggtaacttgcgtcctccatccaaaattttcttcaaagtctggatgtggaatcaattatatggtcatcatatatacgtcaatgaaaaatactaattaaacatgactagtaaataattaagaaatgtaccgtatggttacgtcgataccaatcgtttacgaggaaggtgaaatcttctgcgggttcagggaaagggacggggatgcgagggaggctgtatatacggaggctgccataaccaccggccgctttttggacggcgagggaagggaagtagaagtaactaccgacctgatctttgacttgaaagtcataagtgtaattcttgcctggtgggattggacaattcgtcccatacactccatcttggtaagaatttttcctcatatgcactccattccttcatttatcactttttttatttattagatcgttgatattataattaacatgaaaactttacgtgttcactaataatacccaacaaattaacaagattttgaagaaacgtatggcgcatgcatgtgcatgcaaattgggttcttcatacaatttaccaaactccaatacttcttctaatataactcaaacttctattgaaaagggctgataaagtctcgctaatattaaaacagaaagtggtcaagaatgggaaataaatcataccaagataagagaaagggatcgtcgagatcgttttgaacattgatgaccaaattgtcattggtgagtgagcgaatctccggtccaggaaattgtccgtttattaggattccctatgtgtttttaaatattaatataagcatgatcaatcaaacacacgagaagcaagaagccgttttggaagaaaatgtacccttcgaggcaaagtgtctagagcaatcttgccgtaagtgaccctccagttgtaaaaaagggtatcttcagctttaacaaaagaaatgatggtcgtcgtcatcatcatcatccaaacacctccgtttaaccaccactccatactcaatcttgatgaaactttggtaatgtagaggaggccaaagaagaaaaagtgagaagagagagcttgaatatgagttttggagtttgtagtaaccgaaatttgactcggtgacgtctttaaagtctaatgcgaagcttttcaataagctaaataacttattacgtgtatcattcaatttcttgtaaaagaagaaaaaaaaaagttatctagcaagcccattagcatcctcattagtgaaccactattttgagtgtctcaaaatcaaaagatttaatattttaatgtcaaaaacacattgaccaattaaaaggaaacacatgaaaagtagtgtctttaaataagtggtaaagagtcttaagtgtctatacaaagacacaaatctcttcttgattctctcaatgattttttttattattattgatattcattttatatttaaagacctcctattatggtgactgttgcattctcacttgttgtttcagggcttcattgagatgtattattttaagcagttaattttactccagtgagatcagtttaaaaaaccttcaaacttttatggtagaaaggtggttctcattgacatggttcccaagaaaattttcgcaaaaatagtttgtcaaaaatatagttaagcttgtgtgagataacaccacactttataaactagtaatagattaataagaggaattgcaatgccttttggatttgactttgggggaatacattcgcattagtggacacgaccaacatgcttagtaagtatagtccttgggattcgacgactaccaaaggctctctctcttttgtaattgtttattaagttcacatgatatggttcttatatagtccaatatgacaactttctaaatgccaagatgattttttaaaatttcaagacctcgtacaaagtgttaaatgggacaaaacacagttaaaaccaaaaaatgagggttaagagtttgcagaaccaaaaaaagagcacagcatttacatacacataactgtcttgtagcttcacgtgactctctttacccctcccgaccaaaaaatacagaaaaaaatcacagtagaaagagaaagatacaaaggactaagggtaaaaacggtaaaaccccaaaaagatgagatgatgaagagaagctcttttgaaactgtagagagtcaactgctaaaggcatgttctcttggtcaggactacacttgttgaggtgaggtgggtgtggactatacataatagctcttaacacagccgaaacagtgggaatgtatgccgttttgttacgagctagtagccatgtgagtcccatgagctggcaatctttgctcatcatcttagtccctctctctgttgttgtcttcttgtttcctcctcttacctttagctgtaaatccacccatcaaaatttgaaacaaaaaacaagattcattaatataatggaaaacaaaaagattgcgtgtgaaagtgaagggtttcagagtgttgcagtgctttgggtctatacgaaaaaagaaagtttctgaaaaagcacatctccaattgtttgcaacctaaaaggatagccaaagaaaaaccaacaatgtgcttgtgtgtgtctctttcaacataaaccctaaaattaacagtaaaatttgttattgtgagtttggtgaacatgttactcatggatagagagtgacagctacttgaacattctgaagaagacttcacgcaaatgaaatcaaaacatttattatgcttttaaggataagaaaaaaatttcattaaatgctctgtgaatccttagtgtagggactagggacataaagaatgaaaatttaatgtgacggaatgcgaaaaatttgaacttaagttataaaaattgaaccttttgaagagcaccgaggcatctggtacaaccggagtaagaagagttccggcattctttttcaagattcttcacggcggcggtcggagttgcgtttttgaagccggaggagacattgaaagcggcgggacaagagagtgagctaatctggtggagacgaataccacagaagcacaagattgcgtcacagctagaattaggctgagggatcttgatttgtttagtcaaaagcgcactttgcaatgtgttgacgcacttctgagagtcgtcaggcttcatgggttcgtcgggatcagaagattccggcgttggagcaggagctggtaactggagagcagagcgagcgtgagctgcgaagagccaagcggctaaaacagggcaacatcgactccggtcaaggtttcttccgcaagcttcgttgacgccaccgaatagctcgttggagaggtcaagtcggcagctttgagcttgggtttcgacggggaaggctggtacggtgttgggttggaccggttcgacgagtaggttgctcaagacggtggagaagaggagagaacagaggaggaggatgagtagagtgagacttttcttcattctaaatggctaaagagagagggagagaaatggatttagatattgaaacgttttctcaaatctgagtcttttaagattctgagattcacgaagaaaagcagccttccattattcactatcttctctctcttttgttctgtccaaaggactattgtgaagagagagagaagagagatgtgagggaagaaaaacaagagattcctgacttttggcagtttctggtttgttttagagtctataatccctttgtaaactgtgtttagctccggaaattataggccttgtctttttgttttgtactactagttctagtagtaactaagaattcttaactacatgtctacattagtaactaagcataatgtatagttcatatttatccatgtacatttgtaatgtatttacatgttcatgtatataacatggtggcttttaatttcgcaaaacgctagcaaaaatatgtgaaagagaaaaatttaaagataggagttagagaaaataaaaaaaagatatgaatggtggagaaacataacgagcccttaacgaggtgggatgagatgcgaatggagcatagtcacaggaagaaaaggatcgatatctaaaggacaaaacacaaaaactctctacaatcatatattaaatcattgatacgctttatgagcattgacaaatccaaaaataaaaagaaataaacctcttatttcaaacgggtatatgaatatgagccggaggccagcctagggaaacggtccgtcagggaaaaaggtgaaaactccaaaaggcgagaaaaaaggagtcgtccccactttcactaatgcatttcctaatcttcctctttaagttccaaattccaccaattaaagcattttcacacgttctttgtgttgcttacttacctgcccataccaattagtcaaaatgccttcatccctcaaattcaaattatctatataagacttagatttaactgttccacacttatctcttgcttggaattgaaaagtgaaaatatcattttatatagaccaagtttaactaactcatattatcgatttggtttttagaaaatagttctacaagcttccggaatataggccttaaattggccaaattaacggctttaaaatgaacttgaattgggccttgaattgggcctaaatgatagaactcgcataaactgattaacttgattgacgatgattcgaacaaagcaatatgaatatgtgatgtgtttgacgctaataattctatgtttgcttccgtcaactgtgtatatggactaatggagcagaatttagatatctcgcctaagcagataatacataaacattcatgaaaattttatagactaataacttaatatcttttgagagaataaaaacaagaaatttatacatcaaacaaaagaaagaatgcaacaaagaatcatatgtgtgaaagcaagacatgtgtatgcaaatgttgaaaattaaaacataaagtcatctaagatgaaatcttccggaattccaaagtcgaagaaagtgctggagttggtttctgcttcaatgctattttgtcgtggagaagacattggcgttgacatgagcgagtctaagtcaaaactctctgacaaaggtggtaatacatctgcaagaccaacgtcgtcgagtcttgcgttcataggctccaatgatgaagtttcatagtttgttgggactgtactagtctcagcttgtggttgagacgattctgatgatgtatttggagtttgaagattttggtcgaggttcgatgggtaaactggattagggttttgaagtggcagtagtagagaggccaacctcaatacatcaggattaagaagagaagacgcatgtgttgcaactgctgaaaagtttggctggttgaaaagtgcactcaaaagtgaggacaaatcaagaagatcaaggcgtggagaatgagtaacagggtcgataccactccttacaagtctcttgcggatgtgagtgttccaatggttttttatttcgttatcggtcctccctggtagacgagcggctattgctgaccacctaatattcatcaattcaatattagtgacattaatctatgatcaatacaaaactcctttattattattctaatataggtcaatacgtactagtaaagtactaataatagtttattggagttgatggcctacatttgacatgtacccccgcatgcaaacgtacactctccctttttgagttttacattaattaacatacaaaagcatgtagctgatgaatatgaatttcagacaaaaattatggtgtgaatgatcaggcttacttgtttcccataacactgtgtagctgaatgatagtttcttcttcctcgaacgagaatcttcctctcttgatgtccggtcttagataattggtccatcgaagacggcagctttttccacatctatggagtcctttaatttgtacaatacgacttataagtgtgtgactcaataaatagagaacatatatattaatctatgagaacaaaatataaggaacggtgtgtagtttatacgtaccagcatttttggggagcgtacgccaattgccaggaccatgaaatcgaatataatcgatgagtttctgatcctcctcagcagtccatggtcccttcttcactccatttttatcacaacaaggtgatcttcccatctttgttttgtttcgcacaactttaaatttcgataatgatttggttctgttatttagatagaaaaaatcgaagagccaagtggagtttcttaattttcaaaaagaggagttggattttagaaatgtcaatgtgtggatgtactcataccttctccgttcatttgtttatatagggatgtgaattatgcgaagaactttatcaatgtagaagagagccaaggtcaattccacttggcatgtacctaatatgccacgtcctttgaaatatacaaaaggttataaaccttgcttagactacatatcgcctaacgttttttttttactgtatattctagaaacgatccacgtgatagtatgtatggtatttaatataatctatctatctaacttagattctgttagttcaaataataatatctttatgcgtatattttggagtgatagaatgttcttttgtatgttaatgtagataaagtaatggaactaagagattaaaatagaaaccttgtgggggtaacttcggcggtgagagtattttatgtttaccttatggtggtgagagtcagagtgaagcacattaataattttgcatgttttgctttttgtttgtgggttaagttgttgactttgcttaaacaaaaaaagagatgttgactttgcatgttaatataggtaagttgacttttacataatgtttggtttaagaaaacctgaaaaattaagtatgagaatatatgttacgttgaattttggaacataaagcctagagtttcaaaggttaagagagtgaggacggtaaagtagttggatattctcatcaaaaaaactttcaaataacgtgttaatgtcatgtgccttgtgcttttaaaattgatgattgcaacattttacttatgcaacgttattccaagtttcaattgcttgtggaaggctctctccgaacaagccatccacgttggcactacttagacgatttcaaaaagcaaattaaataactacaaaattgcaaaagaagtgaaacttttttattttattttttatgtttgttaaattgttggtggaaagcagtgcaacaaactttgaattcgatatcccctttatcacaagaaccacaggcttctccgaagttcacaccgaagcttattgtctacattttaaaatattttcaccttcttaaaatagcaatgtgtggattcatgcagaaggtgacacatggaaagagatgtgatgtggggttatcctttcacttcttttttgcatcattctatctactcttaggtttctcttctggattggtcatcgtcagagatttaccaaaggaaatcggtcatcgtcagagatgatgtattgatgtcaagtccaaagattgtgtctaagtcatggcattaggagattctcgaacaaggcctaatactatagcgctttttacttaatgggccattagtggaattaagctttacacccttaatgggcttaattgcttgtaaaaatgagctcatcagtgacgggctaagttacactttgtaattgcgtttaaccttaataagttaaatgttataaaatataaaacaaatgatgacaaaaaattaatatttgtagaatatctaaatatgtataaattggtataaatatattaaactaaagaaaagtatgaaatatatgaaagatgatatataatacaaagacaatggactccatttccatatgtcagcagtaaattagatataaatcctttaacaaaaaaagtaatgaaaaaagactgtaatttttgacaaacaaaaaaagcagtaattactaattagatatgcatgttaaagatcacgttttcatgtgcataaagaccatttaagagtactagtgtttttatctatataaaagaaaaaggaaaatcaacgttgtgcctttaaccttgttctaactcctaattagtcttggtatagcaataccattaacaaaaggttataaaatcttcaggatctccattatttaaatctaattactttttcaagacacgataatatagtaaactttatctttcaaccccttgagagatttcatggtatgatgtctacttcgatcgtcttttgcatgattaacgatgtcgattttatatatttgttatttgattaatcttaaatatgaatacttgatgagtgttgatatgtgaatggttcagtcagagacgagtatggaaaaatacaagaatttatcagatttccttaagaaattcttcataccttcgtacgttctctcgcctgaagacgagcctgaggcgcaaatcagttgtacaactgcacctgagaacccaatcctcgtattcatcaactccaaaagcggaggtcaactaggtgcagaactcatccttacctaccgtactctgctcaacgacaagcaggtctataatatatcaatttaggctttagccatagactaatgattcattggtttttgaaattggcttctacaacaaaaagtgatgaattcgttgattcttcttaaatacgtaacttgattgattttatatctgattttaacctaaaaaccctaaaaatcaaacttgattgaaatatggaaactaattaaattagataactgtctacattattttactgatgatcattatcatatattatatttccatgttttttaattggttattaattatagcatatttggtactcaggtttttgatctggaggtagagaccccagataaagtgctgcagagaatttatcttaacctagagaggttaaaagacgatagtttggctagcaagattcgggacaagttgaaaatcattgtgagttatcttcatcggtacgtaaatagaaaaggtgttaataatttagtcatttgtcattaagcatgagttatgtttaatttaggttgcagggggagatggaacagctggttggctccttggagttgtttctgatcttaatttatccaatccacctccaattgctacggttcctttaggtaccggtaacaaccttccatttgcatttggatgggtatgtatatatacactgatgatcactcaaatcatattatatctcatagaatatgtttcttcttactaaatctcatcatcttcagggtaagaaaaatcctggaacagataggtcttcggtggagtcttttttgggtaaagtgatcaatgcaaaagagatgaagatagacaagtatatattcaattacacatatatcattctctttcaattttcatatattatactttgtttttggattgatatatgtatgcattttatatcttaatcaagttggaagatacttatgaggatgaagcatcccaaggaaggctcttgtgatattactcttaagctaccacattctcttcctcgtattttcccatcagatcaagaaaatatggtaagatatttttcttcttttgcgcatcatctctttcttttattcttatatgatcagcattattcttttcaaattttcaggaaggttaccatacatatcgtgggggattctggaattacttcagcttgggtaacattttttgctctttacgttccacgttgtgttaggtgtgagataaatgatatctaaacatcatgtcaatgatatttgaaacttggattataaattaattgtatgaattgtcatgttcagtacttccactggttggttgtatttgtggaagatacaagctaatccctaatcaaattttactgcaggaatggatgctcaagtatcttatgcatttcattcccagagaaaactgcacccggaaaggtttaaaaatcagctagttaatcaggtttgcattacctttgctcttaaagttttttttttatgttgtcttcaattgatgtggctctaatgtttacattagtgggacagttgtacaatatatttcacgtgactaaattacactaatatgtaatgtttccattgatttcatgaccttccagagcacatatctaaag

SEQ ID NO: 640 - DNA, 93695 bp, Arabidopsis thaliana
gaattcaaaaaaacgaatcaagaagatgaagagtaagagttaaagaagacgaagtaagcaagaagagcacaaagaagagccacaaagtttccttctttaagaagaaccctaaacacaaaaccagcgatctctttcgtcactttccttccttcaatcaccactctcttcctagattttccggcgaacgccatcgtcaccaccactgatatccagatcaccacgatcgcaggcacggctatgaacagcgccgccgccatagataaaactccgaacaccgcaccaagaagcaccgacgcgtaaatcgcaggcaaaccagatgatgtctgatgattctctccgtaccaattaactattgaattcaacgaattccatgaagaagacaataggatcgcgtagactacaagaaacagacaggcccatgttcttctcttgcttataactctcaaaaacaacttgtacgaggtcatcgtctctggttcttccttatccgccatatttgagaacaccagatctgatcttatgattctgtgtctggtttggtgaagttatggtatatagtaaaagagccttcttttgtacaagcttctttcttcttctgattccttttttggggtgagtgtttgcggtgaagaattgtgagaaaaggaaagtgatcgtacgttctttttagtttatacttaagcctagtcgaatctgatgtaacgtgaagtacacgctcttgctgattaggctgtgtttgtcacgtgcctcttttattagcggtccagttaaagtctttgccttttcctgcaaactgacagttggagagctctgtttccattttttctagtttcacttttggctcacctcccaaactaaccgtttcataaaccaaagtgattagtgattaatttgtgtaatacttacactgtttttcttaaaagttaacacccaaaaagtcaatttattatgtaaggaacaatgtatcaagtttttttgggtattttggaaatagttaattttgtataatgcaaagtgtaaagttggttattagcaatctaagatcttgcgatccaatttactagtgttaaggaaagaaaaaagagagataaaagctgcctataagctataactgctaattttggaccattataattttattattatatagtatatctaaaggggaaacattcaagcagaccaattattcttttgaactaccaaccaatgtcattcaataatatctgaagacaaagcaaaccaattcaaagtaacaatacttaaagatgtttgagaattatactcaattactcattgtggatcaagagcattggagtatctttttgtcaaatatgcatcattattactttgaaaactatgcattgacttagattgagtaccttcttacacttgttattaatgttgtattctgaagaattggtgcaactcatcacctatgaagcttttttacttacccaacttcagcttggaccatacctaatcacatgcacttactccttacacaatttttcttcttcttcgtcgtcacattcacaatatatctgtttcacaattactaggctatcatcatcgtactctagtatttggcatctcacatagtttaaatatatttatatcaagtattcagctgatagaaagttataagttagatactgtatttaacgttttcactaaaacagaaaatgagccattgatggtaatcagtaaagcccaaatgggccttcaaacccatattatagttgaggtttcagaagctcttccacggaagagacagagaatgaccgacaaacagagagacgaccaaaagaagaatctgtgttctctctcaaagaaataaacaaaagaaatgtcaataacttcacgtgtcggtattgtgacgtggaagcattcgttttgacatcatcagagaacacatcaatccaacaaagaagatcgatattttcagattcaagaaatcaaatcttgttaaactaaaggacaaataatgaagaaagatttcaatatatacacactttttttttggtatcaatgttaagtttaaaaaaaagaagacgcaaacatgcaaagaagggaatcgaactcaacacccaaaacttgcatggggtgttgtactattttacaacatataccataagataagatgtcaatatattagttatgaatgttttcgttaatgacaaaatgcaaaaactgaatcaagaagatgaagagtaataagagttaaagaagacaaagtaagcaataacagcacaaagaagagccacaaagtttccttctttaagaagaaccttaaacacataaccagcaatttctttcgtcactttccttccttcaatcaccactttcttcctcgactttacggggaacgctattgtcaccactaccgatatccagatcacaacgatcgctggcacagcgatgaacagagctgccgccatagatagaactccgaacaccgcaccaagaagaaccgacgcgtaaatagcaggcaaaccagatgatgtctgatgattctctccgtaccaattcactatcgaattcaacgaatttcttgaagaagacaaaaggaccgcgtagactacaagaaacagacagacccatgttctcctcttgcttatgactctcaaaaacagcttgtacgaggtcatcgtctcttgttcttccttatccgccatatttgagaacaccagattttcttatgattctgtgttggaattgaaactttgattaaacctgaaaaagagaaaagcttcaagtgggaagaagatgaagaaaagagaagaaccaaaagcaaagcaaaaggagaagaagaagttgtcgaagaagaagagtcaacagaagagatgagaaagtcaaagatgaggctattgggctagagtgaagcccacatagtaaattagtaattgtgtgttttggttagtaaatgggctattattagagttgagcccagattttgtgcatatggtgtgcttataattaagctaagctagagtagctaaagagtagttgttaagaggagttgtggtgtaaggtttagtagtttaacgttacttgtggttttagtctagtccttaggaataatcatgtctaagtgggagtagttttaaagctagaatgttaagtgtgtgaatgtgtatcttgtggtgaaataccactataagtatgtgtattgtgtcttgtagagttatccttgtgatccattagtacaatgtagacaactaaaagaaaaaaaagaaaaaatcgtttcttgtgtttctctctaaacaataacaaaaacagagagtgtaacaatgagagagagacataaagaatgagagttctaacctagtgtaaaagggaggtaacattcggtgtctggtttggtaaagttatggtaaatagtaaaacaatatttgcaatgttgcacactgtcaacatctcccaaacgcaccgtttcataaaccaaagtgattagtgattgattagtaatacttgcactgttgcacatagtaataagagaatatcaacttcaatgtttttgaattgaacaatgaacctaccaaaaaagtagttactgttaggcatttgacatgatgattttaggattaatatatactaggtcctattaatactatgatgcttacaggtgacgaataatttgagttatgtgcgatatgtttgaaagaattaaagaggagaatcaagaagaagatgaatatttgacatttcaaagctgacttttttgacgaataagttcatcattattcacacctataaatgtggacagcgaaataccaagtccaacaatttcacgattaattccaagtggcttggatcaagaaatatacaaaaacaaaattccaaatgcttaggaaaataaataaacgagagatcaaattatcacggcggatattatttcgtccacatttgttgttcaaacagatttctaacacatataattagcatatatacattaaacaacattatctccttaataattttgactctggaacagatctttccagtttcagacaatatatttgaacaatcggttcgttgaatcgagaacaaaccaatcaaatctcttttgacaaagctcttcttcttcttcccataaaacttcacaacggcacacgtctacgaaaaaacctctctcagtcatcatgttctctaaagtttccattcttctcttttccctcgcatccctactcttgttccgatcaaccacaggcatcgaattcatctacaactccaatttcaccacaaccaacacacttctcctcggcaacgccactgttaaatctccaccgtcgatcctcaccctcaccaaccaaaccactttctccatcggacgtggcctctacccttcaagaatcaacgcctcctcctcctctgcctcgccgttacctttcgccacatcattcatcttctccatggctccttttaaacacctctctcctggccacggcttcgccttcgtcttccttcctttctccgaaacctccgccgcaagctcatctcagcatctcggcctcttcaacttcaccaataacggtgaccccaatagccgaatcttcgccgttgaattcgatgttttcgctaaccaagagttcaacgacatcaacgacaaccacgtcggcgtcgacgtcaattctctcacttccgttgcatctgaaactgcaggtttctatggaggcagagacggccagagattcacggagctgaagcttaacagtggcgagaattatcaggcgtggatcgagtttaatgggtcagcgatcaatgtcacgatggctagagctagctctagaaagcccataagaccactcataagcattccattaaatctcactggagtcttacttgatgatatgttcgttggattcactgcctccacaggacaactagtgcagagccataggattctctcatggagttttagtaactccaatttctccattggtgatgctttgatcactaggaatctaccttcgtttaaattgtcaggtgactctgttttgaagtctaaaggcttcattgctggggtctctagtggtgttgtgttgttagtctctgttattgggctcctctgtttctacgttgtaaggcgtcgaaggcagagactagaaggagacgtggaagattgggaaacagagtattggcctcacagagtgcaatacaaagatgttttggaagcaacaaaagggttttccgatgagaacatgatcggatacggagggaattctaaagtgtacaggggagtgttggaaggtaaagaagttgcggttaagagaataatgatgagtcctcgagagagcgttggcgcgacgagtgagttcttagctgaggtctcgagcttagggaggttgagacacaagaatatagttggactaaaaggttggtctaagaaaggaggagagagtctgatattgatttacgagtatatggagaatggaagtgtcgataagcggatatttgattgtaacgagatgttgaattgggaggaaagaatgagagtgataagagacctagcctcagggatgttgtatctacacgaagggtgggagacaaaggtgttacatagagatataaagtcaagcaatgtgttgcttgacaaggatatgaacgcgagggtaggtgattttgggttggctaagttgcagaacactagtaaagagatggttagcacgacacatgttgttggaacagcgggttatatggcgcctgagttggttaagacagggagagcatcagcgcaaaccgatgtgtatagctttggagtgtttgtgttggaggtagtgtgtggaaggaggccaatagaggaaggaagagaagggatagtggaatggatatggggactaatggagaaagacaaagtggttgatggtttagacgagagaataaaggcgaatggagtgttcgtggtcgaggaagtggagatggctctgagaataggactgttgtgtgtgcatcctgatccgagagtgcgtccgaagatgagacaagtggtgcagatattggaacaagggagattagtggaggatggtggtgaaagggaaataagcttgttggagagagtgaagagctcttacttgttggaaactggtgagggaagcagacaacaacatcccacgttccaagatgtatggaattcgtcttcttattctaattccttccaaacttatgattctattcttcatggaaggtgaaaaaactagcctgggagtattttttaatcgaatttctatactattagtttatacatgctgtgtgattcttttgtatataagattgtatgtatttgatgactaaattgcatgaatcattttgggatgatggtaggggcctgtgactgttatttattattattactatcaattataatgatattaaaattgaattatgttgtaacatagtgacaaaacaaatatcatattaataataaaaaattaaaatataaatttcttaaataaatgactaaataaatattctcaacaaacaaaatgcatatgtatattcattcatttattcttttaatatccaaaaattgcattaagaagtggaacaaactgataaaaattatggaccttcgggattatgatgataaatgttgttttgattcgtcaaattatccagacgatttttttccatgtttccaacacaagttacatccaaaatgattgttaacacctccagaaacagaatggagaaaaacagagacgcttttgttaagtgaagtttcctctctgggaacatgtttattgaatacaagaagcaaacaggtcctatagagttccaatacaatatcaaaccaaaaccaaaaaaaaaagcaatttaccataacagagaagctcttgttgcaattgcgggaacaaagatactagtgagacgaccgtaccaactctgaggaccgatgattggctttggtacctctgcggttccatattggacttgtctcgatgagcttgtgtggtacaagctgtctctcccgtttgcttttcttcttaaaattgtgaactttgagccttgcaatctcagcttcttcctctggagtcgtctctctaactatgactgttaggcgacaccggggtattgatataatcccgcttcttccttttgcatggtaagctaccttcttcccaaacagtcccttcccaacaaatgcttccgctgcaatcacatatcacaagcttagatgaaatacatcgttctggcatatcatgtttgcttccttaaagtaccaatcggcgaactctctaaaatatcacgttctctttttaaatgtaaaacaaggaaatcagggatccagaatcagttttacataccaacaaggagacggtcaggatctagtccatggttatgagtagcatttgcccgggcagcgtggataacctgcagtataatgtatttaactcctttaagcattgtattaacaaaacaagttgtatgctaagtatcattagatgaggaaagttatcaaatgcctggagaggagattagactagacactcgaaatccaacagtgatttgtttgtaaactcggatctcagagattacccggtacacagtttgtgcagctcgtttgactgtgacctgcaattggatcaaagcatcttcaacacgcatgccacggactagtgctgcaaccaggttgaccttcttaggactctgaaaacaagcaaggttgggcacattatataactagattgagatggaaaaatattaaacgaaatggagcagatcatctgaaaagtaaaactgttctaggagttaaagaagacacctgctttatagacttgaggacagcctgaactttctgacgctttgggataatcttctgctcttcttcttttccactacccaacagagctggagatgacaaaggtgatgatacaggctcttcactcgcctgcaattgtctcgaggtagagatcccctgaaaacatacccaaattgaaatttcataccctaaagtacaggtccctaagttgactagagacgcatagttccaaaagatgagtctcttcgcctaattcacatggataacagatatagtctcccactagcaacattctcacttcccaaattttgaaattcgatttttcaatgcagcaacaaatttgctatatcaggaaacaagaaactccaatctcagtaaaacacaaaagaaatgtcgattcaaatgcattaccagttgttgtagatgatgatacagtggtctggaggagtaggatggtctcaggagactctgcaagtaacctataatcaccagcaaaaaaactcaactcaaacacacaattcacaaacacgaagaccagataacacatgccctttgaaagacccactaagaaacacactagatttcggaaatgatcaaaaagtcaaccttgtgagaaaggggattctaaattccgagtagaagaagagtaatttgctgtagaaatgtgactgttcttcactcttctaccaacttgacgaataacagtctgcaaattcctcttccaacccaccattttgtttctgaaaacgctaaggatatgaatcagagaatgtaaacgattggctcaatgccggttctacgggttttcgaggagttgcatctgaagctacagtactactgaagaaacaaaattaggttttgtggggaagatgatgaacacaccaaatttgggccgagcccgttacgtttaagctttgagaaaaggctggattatgggcctatgacatccgagtttattttatctttttggtttctatccacatttgattgttgagaaattaataatattgttttatcttatgtttaattagtaagagcttattaaaatttattttatggattttattatacatttaatttatagaaaaaaaattctagtttaaatgcattaaattccggtatattaacttttagaaagatattttttgaagtaattagttttgataagtttaagaacctaatgtgttttgtaattattattaaaatatgttgatgtttttgctttctacacttgcaggtccgtgcgataggagaagggatgagatttagatttggacatgtagatgatgaactagcacatattagggatcaacaccagcaactaatttctcttctctgtgccattgcagcaaatataagaggtgacggagcagagccgtgccaaggtcaatggttgccggaggcggccaaatgaaatttgccccaattcacaagcaaagatgcttataataatagaagtaaaagtgtttacaaaaataaattgtcatatgacaaaagattcaaagttaatttttttaaccaattctatatcgaatgctttaacctaaatttataatgctttgttctgttttatttatttattctgtgaatatttttctatttttaattctatatttttattatttaggtaaatgtaagtgatttgtcaatattaaacctatgaaactaaagttatcttgtaaaaatatatgctcctaagtttttttcaaaaatttgaggacgtaggcgaatgtttctttcttttgccttgaggcacggctctgtgacggagtcccaccacctttggtgggtaaatttattagaggtccttaggtggttggaggtggaagctatacttgtgtattatttcataatattgcccatttcatcaagttgttggcctatcagttttgtcttatcatccactgcttgaaaatcttgttctagtcgcatgaaaatctcctaataaaattttaagatagttaagagactttgttgtttttttgatggtcaatagcaaatggtagtagatacccgcatttttatgaatctatatcatattccaaacaaaagacttccaaacaggagcgtccatactagagacattagagatccagaatcaaactttcaactttcgacccaagggctggtattagtcttacaacagccacatccacaacaagaggcaagctcttcaacaaaaaagagtcaatcggctttatgattgagttaacaacctaaataccaactatttcattggtaatttgatctgcaaaaacatacaataattaacataatttaaattttttgtcatatagccgtcttagctcagtggtagagcgcgtggcttttacccacgaggccgtgggttcgatccccacagacggcggtagtatattttttttgttaactccttgacatattctctctattggatttcggtgtaccggtttaatatattgattaaagttaaattgttcaaaccattcttatatgtacaaaaagtgtataagatctatttatatgtttcaacaagattttagtttgtgtggagaagttttattgcatgagctatgtgaactctacatattcgtcgtatatattcatattagtgtgatcataattaaaacacaaaataaaaacattcgcatctaatcaatacaaaaaaacatcttaaatattttctttagtaagaacaaaaacgagacagcggaaacattaaaaatgggttacaagatgcttcaaacatacaaataaaaaggcacataaatatgaaactcaatggtagagtaattaataccctcacaaatttaatgactagcgacaatatataaacccctcaaaacagagaacttatcataatcacaagaaccaccatccccggaccaaccaaaccggccgaattgggagctgtagccggtcctggagctggaacacgagagtttgaatcagatgatggttccactcctggagaaggccccggcgaagacaactcctgatggaccggagacggggagggagaggtatgacgaggagagtggctgtggtggacggtggacaagaccttgacggctagcttctgacctttaagacagttttgagagttgccactaatgaaaaagtaggaacctgagtggctaagtaggaagagagagtctccgtctgagagggaagtcagggggtgtgtcgtgttgcatgtgttgtactcttgttcagtcacctccaacactgaatcttttcccttggcgtacttaaaatcttgtaaaaatcaaaattactatgcattaatattgacacattgtgtatatatagtagagaagaggaaatagacttacgaagagtgtcgttgacttgaaaccggtttcggtgagaccaatgagaataatcttcggaaggagtcgggacccaaccatctttcccaccaacatagaacttgtatccatttgatatcgtaaaccctaaacccatcaacatcacaaacataaggtaaagatcaaacctcatgaccaaacccatctccgatgcaaaacgttaatcaaaccccaacttcttactaactcttttgaagtgagtgtgtgtgtgtgtgtgtgtttgcaacctcaagaggtgcttatttatggtgaaagtaaagaaaacatagccgttaggtcaagctttttgggctgtgcatcgattacctaaagaaatgcgaattaagtagaagcgttttggttttgctcctgtcttcttttgaacacgtctcgacatgcagtggacttaacggctatctacctttaatttttcactttctttctcacaaacaaacatttctcactcagatcttgtaattatttagccatcaaatataaaattgtaatcctttagtatttattattatttaaaacttacgttacatattgttttattttatatttcaatttacaaatcgataaatatcccagtgatacaataataaaattttagtgggcctttcaaatggattgggtatgttgtaagaaaggctttgcagtttcttctcctctacctttaaagcccaactattagtagaagactgaatcctttttgattgtcttgtagtttacacaatgtacacaatctttctcctaattttatactctttctcctctacttttaaaacatcaactactgtagttggacaatattagaaattgtttactttctataatgaggatttagtgggggtgaaggatctaattaaatatttgatgatcgttcctaaactgtgagatcgaaatatacaaatttctacttatgttttagtccaaaaaaaaacgtaatagattggtacaaatcctttttgaggaaaaaagaagttttaaggcgtaaagaaaagacctgagaatatgaaacctcaactaactaatttatcaattgaaccttccttcgtttataacagaaaaagctaataaataaaaataaaaataaaaatcagagagaccaaaaagaagtttcgacttgttcaacaattgagttattgaagaatacgtttgattgagaagcttcaacgaccgcaattgcccaaattcatcaattggagttttttataaaacaaattgcatcttaaggttgttattgttgttgttgtttatctgtctgtaatcatctttctatctgctgtctgatacatctacgaatcttatgctgtcttttgggttttcttacacaaccaaaaccaaagcctagttttgttttgacttcatttgaagcaaacctctttctttcttcagttatgtgggtttttgagctagactcgaatcagttctgatccagtcggattttgtattgagtcataaagaagggatttttgggggttgtgagtgatatgaagaagcgggaacatttgggattagggttcttcgagtggcagattatcttatggttatcgatttggttggcgatttcgcaacaagcgctgggattgagacctattagggagaaacctcgatcatggagtgacgaggtatgtgtgtgtgtttttactttattgatgattgttcgaaagtttcttcatttcgatgtttcccagaaacatatttttatgttttgttcgtaattttgatgtgcctttccaactaagaattcgagcagtttgctgtcaaatgttttttttattgacttgtttctgctcatgatttgctgaacgagaactggtcataattgatgattttttttctaagtctgagattttctgagtttcgaagaaaatggaccatattgaatgaaaatcccggagtagagcagctctgatctaagttttatcttttgatttgattgagcaaagctgaaaatgtatataaactatttacattagctcgattgagctcatcggtatctaagctttgttctgccggcgaatactttgagatgaataagaatgaatctgtcgttagtagtgtggtgtgatgagactacaataatggagtctaaggtacatagagaccggttagttgttacagaagtagaacgcgtgatagtggggaatcttcgatgacattttacagtttgggtttgtagctagtgacttttaagtagactgtgcaaagggaactcatgtacgttagactgaccaggcaatgtttgggtaatggtttaatacgtgaggtctttgtgatcttgcagtggctctttggtaggaaacaagaagctgaagttggacccttttctgcttggaatataacaggaacttatagaggtttgccgcatgcccttctccattttttttacgtcttttacacttcaggattgtctacgatgttgtgggtatatgtctgtagcttaatgttttagactacttatcaaatgtaaagcgggtattttcaggaacttggaagtttctgaattccttaaatagctcttcgaagtttcaagactttcaaaaagaaaatggtaattctgtggttgagttagtagcagttccaacgaagataactggtgtgcattatgttcaggtaaagagttcagcttctaagctctgtatcataggatcaccgttgatgttgtagaatgcaatgttttgaacttatacaacgttaatgaaacagggtgtagttgttttccatgacgtatttgacaatgaacaaaatgtgggtggtgcccaaataaatctggaaggtgtatatatatggccctttagacaactccgccttgtggctaacaggtactaacttttgatttatttaactgctcttaagatttattattgagtcttaactccaaggtctgtacatcacttgacctaaacagcggcaaggagagtgattcagggcaagaagacaataatcttctctcaaatccctatcatctggtagtccttaagacaacgatagtgctttcttctgctaatggcttgtttgatgtgttaaaatgttccaagagcttactagtgtcaactttctgttgttgtacagcttggaattttctcctctcaagtgtttcaagaatctccaagagacagattactgaaacggaaactttgtaagcagtatcttattttctccagtatggtttacttttcagcaacactgatcttcaattctcttgtacttcagctccagtaaatgagatggagaagcactgtaatatcgaaatagcagctcaagtatcccgtgtggcttctagtgaaaatagtatgcattctaactttaaacatcgaagtgatcttggtgtattctttgtctcctttgtcacatttaattgtaaattgaaagacttttccatattttggtagatggagacaaaaattattatcacatggaaggattgatggaaagtcctggggtaggcgatgacggagattgtttttcccctttgttactgaacgcaacttctgtaaatgttgaagtctactataacaaagctgtgaactatacactgatggtcacttttgtatcctttactgaaaagtcgtttactctttcataatagaatgccgagttcttgtgcaattttacgtgttccttaactctctattgcatttaggtctctttcctccaggttcttctgttgatccggcaaatggagcacggtaacacacaatctgtaagatactgttttaaaccagatggtctgatattgttattcttgtacagaacgaataaaaatactaacttccgcaagttattgtatacaagggtgctgctaaggtatccattgtaatgattgggcaacaagcgatcatggatgcttatttgtgcctcttacatctaacagccggtatattagtcggtacgtattttggttataattgtactcgttaaaggatgccatcttcttatgctttttaattaacttattacttctttttcatgtaacatgtttagcttttattttactctgtagtgtcccttcattttgatgatattctttgttggtttttcatggaccattcggtccctcatctgtctcactgacccttatgctacctgacattgtgatgttcttttctttctcaattatcaatcagtgttaaacctaaagcttactacttctcatgcagaatctctatttaatgcatttgcaaccgctgcgttcttcaagttcgtagtcttttcgatttttgagatgagatatcttctggctatatggaaagcaacccgtccttccaatagcggagagggttgggaaacaatgaggagagaactgtcctttctgtacagtcgtttctgtgagtacttacttctttggtgttttttttatcgattaaagcttcaaactcttttcttactgcatgtttatgatatgggtcatatataactgcttgattctcttaccctcttttcaatgctattttccttgaaaccaataccaagaaaatggtttgaattgtcttccaaaccacagagaaaaatgtaatatcccaatgagaaaattgcatttttggaaactatacgagtatatcctgtcactatggtatggaaaaatggttttgtttatcttctcaaaatttccaagttattcactagtttatgtaggttttattttgattctaaggacaataacctgcactgaatcttgagtgctagatattctcaccatttatgtgacttctgtttttcatttagctgaaactttgacgcaagttcagatgctaatgctgatgtttcatcattttcacaatattaaacagatgggatccttcttggaggcattttgataatgtaccagttccacaactacatgcagccgattctccttctcatgtactcattttggataccacaaatagtcgccaatgttgtccgggattcaagaaagcctctgcacccatattacatcttgggcatgacagctacacggttagctataccgttatatgtttttggatgcccacacaacttcatgcgtgtagagcccaacaaggtttggtgtatatgcttgtgcacattcatggggttgcaagccgtcattcttcttcttcagcattattttggttcacgctgctttgttccccgtcaggttagtttgttttgtattcatgtaaactacacatgaaacaatatatctaataaagtgaacactaagttttcagttcggtttcagtttggcttgaatatttcaagtctcgttcccattgctaagttgtttttgactaccactaatctctttcttcatcgttttgcctacacgcagatgctaccagagaaatacaactaccaccgaagatttaatcgggatgtaagccgcaccactgattgtgttatctgcatgaccgctattgatctcagacagcataccagtgattgcatggtactgcagttttttcctgcttctcttaactatattttttccccaatagacagaatcatgagtgtggttgttctgaaaacaggtaactccatgtgaacatttctttcactcgggatgcttacagagatggatggatataaaaatggagtgtccaacttgtcggcggtctcttcctccagcatagaggatgttttcggtttgttaggatgtacagacttcactcagattattgcgggtaacaactcaaatctaaattttttattttactttttttccttcgaagtttctttgcctattaggtctatagatagggtcttggttctatctgaagaaaatttgttgctaacagaaatatgatttcataaatgagaattcaaaatgataaaacccaaatctctgtaaatagttggcctatgaggaatcatgcttttatttgagtgtttcaggtttgtcggttcctttttttgtctgactgtgggatgtattacttatttgtcaaacattcctgaagtgtgattgttcacaaaatcgcgaagttaactgctgcaaaatttgatcctgaaacaggtggggctggttctttaatttcaggtccttgcagaggtttagaagatttttagatgaaaacagagcaaaggtggaatctgtaactgcggctagataccgcagatagacaattgtgttctgtataaactgtattacgttataatcttagtgcatattcttcaccccacaactaaatctttcacacatttctagttctttcattttctttgcatacatagcatcttgtcattgtgcgcataagagtgaatccttatgtgtcagctggaccaggagcaatggaaggtcctgcggtagatggagcaaccagtggagccatgggtgagcattcgtggtcatagcagtctatggggtgctcaagtacagcatcacagactttttggggacgctgaagcggtttgtcaggcagacagttgtagcgatcatcgatggctattcctctggaagtcaggttcctgcagataccttcttcttcactgaaatagttgtaagagacggtaacgttcagcaagctgggcaaaacgcagactccaagagggacagtgccagtgaacatgttgtgttccagatttagctgctcgagatggcctagcccagcgagactgtaaggtacaggaccaactaaactgttgtagctcatgtccaggactcttagcttgtagagatacccgacttcggggggtagacacccagataagcttgagttgattaggagaagctcttctaaggtatctgcaaagcgggctatggttggaggcagacaaccgctaaaatcattgttggcaaagacgacaacagaggcggttgttcctgtgaaatctcgggggatgaggcttgttaaccggttgttgttcacaaaaatggcatcgaggggattgctgaagagttttggaggcaaggggccttcaaactcattgtaacgaaggtcaaggtactttagagaagggagtgcaaggacgacatccggaaaaggacctacaaagcggttgttgctgaggtcaagttcatagagtaaggatagattggcaaacgaacgaggaagtatgccacagaagcgattgctattgagatggatgagagcgaggtcagagagaaggccaatggcttcaggcaggaaaccagcaatgtcaccatgattgagatcgattccggcaacaactagagtgtttggattggaaggggatggggcacagaagatgccagtgtagctgcagactgagggaccgacccaatctgcagttaagttctttggatcagaatagattaccttcttccatgctttaagtgcacggtacgcttgctgaagatgctgtttagggtttgtggagtgacttgtgtggtggtgaaggctatgttttgctgttgatactaaagagaaatgataaagaagaactgagataaggacaggaaatgttatagagagagccattcaaagacaagttatggatcctttgtcttaagtgtggtggatttatatataaagacaataagtttggtctttggtgcaacgattacagaggatgaatcaggtagtggtataagatcaaggaaaaggacttaactccttacttgtagctgtctggagtggtttgaagtgggatttgagactgacacatttgaagaccaaatcttagtgttggacttagatcactcattcgcttacaacccaaggaaaccgaatctgaattatacaaactttcgcataaccatacatttaaagttcttttgatctctcagcttatgttgactttttaactgataatattcactaaaactgttttaactacaaaaaacataaacatggtattggttttctttgtatttattcttttgtcaacaaaagtcatagaagtatagaactaagacaaagggccacaacttgacagagacactctatattctaaaagcaacatttatacgaacggacacactgctttattcattcacagacctcaagggctattctttcatcatcctcatcgtttagccaccaccagagccatacttcttacccaacacaatgagctggagcttgtcatagccggccagtacaccagcgcctgcaaccgcacgaaggatgttggcacctgcacccttgaagagtgacttggccccttcgttcttgacgatctgagagaaggcctgaagagagctcttgtacttcactgcttcacctgacgtcatcatcattcttctgcgaaccgtgtcaattgggtaagacgccaatccagctccaatggtgattccccatcccagtaagaaactagcaaggaagctatcctgtacagattatagcaatgagtaaacagtaacagaggactcaatatgttgaagtgaggagttttctttgttttttacctggagaccatcaactagaaccacaggcttcaaggaatcatacaatccaaagtaaagcccccggtacacgacaattccaacgcatgagatgttgaaaccacggtaaagcccgacaatgccatcagaggctatagtcttcttgtacacgtcgaccatgccattaaactgccgctgaccacctttcttggccgccttcgcatcattggctaaacgggtacgagcgtaatccaaagagtacacaaaaagcagagatgatgcaccagctgcaccaccagacgccaggttccctgcaaaccacttccagtagccatctttttctttcttgaagttaaacagcctcttgaagtaatctttgaacgcaaagtttaaagcctgcaaaacaaaactatttgcttagcatacccatctcgacgtctatacaaataccacgtcaaagaagagaaaacaaacctgagtggggaagtatctgataacattggcagtgtttcctctccaaagagcaagcattccttcgtctttgactgttcgagcaaaacaatcactgattcctttatatggctcagagagacgcccagctttgatcatttcatcttgattctgaatcaagagcttcacacgctctataggcgcggctgccgtcttcgaaacagcagctgagactcctcccataaggaaatcgatcaagaaaccagtaccagttttctcactaggagcgtgagctaatacaggaaatgaaccatgaggtataagagacgagccaacgccatggctagttggctgcaatagactctgcaaacctccattgacataagcaccagagacacagtaaccacgagcttgcacactcggagaaagtctattgatcaagtaagattgtccatgtagcttctgaaagactgatggatgctttgatccatccattttttgtacaaatcagtaaaagctgactctgaaaaacaaaacaaaacaaaacaaaacaaaaatacaaattaaacaccacaaaatcttgctttctcgaaaatttctatatttgcatgcttaaaaaagaatgatcataaccaaaactggaacaaaaacagagaagacatcatcaacacatttcatacgatcctagttagcttcgttaaagacaccatttcaatctgtcaactataatgcgacctaattagcacaaattaaaacctagttgcagcagctcaattaaatcctctgtttctaaaagatcaagcaacgagtggcgtcgagaaaacagaattcacgagaagcagaacaaaaaaacagagagagctaggagagaagcattaatgataaagctagaacttctggagtcgagagcttaccgtggatttttcgccgaagcgttaacgagagagagagagagagctgtggaaaattgcgagaagagtaggtttctacatgattctcgacttctggtcctaaactaaaagacgaaactgagcagaagagaaggtacaattacgaaaatgctactggactcctttgacccgtttctttctgggcccaattttaagggacccgagtcttgacttcttctaaatggacccaaaatttattttcctaggaagataaaattcatacctaatgaaagtgagagacctctttatcattatgtgatatatgtctcatctacctgaaaattaaatatagaaaaatagaacaataatcaagacttttttggtttgccggaaaaatataatagaggcttgttaactaggtcttaaaaaattggatgttacttaagaagcaagaaagaaagttgaatcttttttttcttcttcagccggacagaactttacagatgcaaggaaggtgatgtggttcgaatttagtgatccaaaactagttagagaaatgttctacaaacaatgaaacaaaccgatacgtattgagagtaccagaatataggcaatgatatcggctcatgtattagataacaagacacatcatacatgtcatgcgatataaaataaactcgaattacatgcaataaccttaatatgtgtaggtagattatttcaaaagattcaagaaaactaaaagagaactcagctggaattcatccgagtaagaaggaaacatgagaactacatgtgttcattaaactaagccatgcataataaactccaccttagaaacgaattgattactatatatataatatatagatatagatttctcttcgtacacgaatcatatatatcaccttcgctagctagtgtactgagttcaatgaagatacatgccatattggtagtagcgttcttggtcctgatgaagaccgccgtttcccaggacaataatccgctggaacattgcagagacgtgttcgtgagtttcatgccctgcatgggcttcgtcgagggaatatttcaacaaccttctccagattgctgcagaggcgtgacccacttgaacaacgtcgtcaagtttacgtctccagttactagacttaattctcgattcttctatttcggtttcttctttcaccatctataattatattaactacgcagggatcgaggaataggcaggatagtggagaaacagagagagtgtgtctgtgcattgagataatgggaaatgcaaatcatcttccttttcttcccgccgctattaataaccttcctctccgttgttctcttactctcagctttcccatctccgttgatatggactgttctcagttattttcattcttctctccatagttttttaaaaatcttttcctagaagaaaatgttatatattacatttttccttgtgcataaaggaactaatgaactggtataattttgtcattacaggttcagaaacaccaagaatcccgacgttgagaaattaaattaactaccaggatatatatctatgaatattgggaagggaagccttgtaacagttctatatagttacaaatgatatataatcgagtttattgtagatgtaatagtgactagtgttacaaaagtacgaagaattttctgtaagcgattatatatatgtatattcatcagatatggcttctcttctatttcttagtttttacaataaccattattacgggaagcaaaaaatgccaaaattgtccattaagaatcaaaacttaaggacaaaacttctggctctcgtgacatttctacacttataattacatagccaaacggataacataacgaggcttttagctttttacaaagaggaacgtggtttaaaattttgttttttaacagatgagtaaatggcaacaacctaattaaatacatccagtgacttcagcagagtagatccaacactttcaaagccacgattatttcaatcgatcagctataatacaatgttacataatttccatataccaagttaccaacacggaaacaccacctatataacagctgcagcgagtagcacaggaaaaccctttattgattgatgtgaaagtaaattgaaattgtttttgggtgcatagtgcgagttgtttcaggggaatgggggtacaaatccgagaattatccgagataatttcgcaattttttattttaaaatgattcacaattacttaaaataattcgcaattgtactttaaaatatccaaatccagctcttaaccaatttagctggaataattatacatatatatgaatcacccgtgacctagacatgcataatatccaaattatctcattttttaaaaatataccattcagataagaattttagaaaatcattttcctagctaacgtaatgtctattagggacaatatcccacatcggaagttgagtaggatcttaagtggtatatataagatatgggtctctccacctattgcccacactctaataatgtctttattttttttcttttttcaaacaagcgttaattatgtccagctggttcaaatatttaaactgggaaaaaattataaagactaattaggtctaacagattaacctatacaatttgcatgtttacttaacgaaggaagcacgagagttacatgtttctttaaactaaacatcatataaactaatcaactactaaatacatatatagatttgtgatgaacacggatcatcttaattaccttggctagtactcgtcaatatcagtgagttacatactaattttaagatgcatcgtgctctattgcttatgacactgatcacgtccgcggtttccatgagtgaagaagagcattgcagggacatgttcgagagctttattaaaggactatctatgcaaccccctccacagtattgtagaggagtgagccgcttcaataacgtcctcaagctcacgtctccaattactgtaattgattcttcactctctctctctctctttttcatctatactaaaaccggttgtttaaccgtgattaaccgggtgggataaccgagttactactatatgtatagttgcaggtattgacgaagaaaaaggtgaatgggaagatagggggacggtgtgattgcccggaattagatataatttggaaaataagatgtaaaccttgcgcacaaaacccagacccgaatgtaacagaatctgaatcacaacatgtgttgatgtgagtgttcaatacgtccatgtgggggtgcatatgcattctaggaaagatgatcttataattttctagtatttgttcacttacgttttatcgtagttttctaagttgttgtatagatattgtcgtttaataagaaatgtcacacatgcaaacctttgaacgtcacaaatttcgattcatattttgaacgttgatgttctattgtttttgtttttaacaaaagtttatcgcacttgttcctcgaaattcacattttaatctttaagttatcttaataacataggatggaaaaaacagagcattttcttgtttttcttctcctcatggattcctcttcacttccctttttaccaatgtctccgttgctgtctgattaaaaaatacgattaattttctactaatagtagttttggttatccatgtgtttctttcagataatagtagtattaaaaaaaacacaaaattaaaagtccactttttactgccaaacagtgaggttcggctttccataattaatgatagaataactttgtccttcattttttttttttcaatcaatgacgacttgtacctaccaccacaatttcattacataattacttttttatgaatcaacttggtctttttagtcgtccaaattgacaaggcttgactcggagataagaacacaataatctgcccatccacagaagacagtaaaagcttttcagaaagtctatagaaaagatgtcaaaatatgtggatgttgtaaaagatgatatttgatcatttggtaaaagatgaaaacagagaaaacaatacaacgtacagaggcgttggtgcgaaacatcactaatcagaagttatgttgttcttgttcttgtaacgattgtaaaactctggttttacacaaatctataagatttacagctaagttgtgagttattaaattataacttttgactaatattttgatatataaccactgatccactatcacttagtcttcaatttttaatcgcagaaacataaaaacgtctagtaagtcacgaaaccttgattagacaaatcaccaactctttgacggcgaagtatatgtgtgtgattgtgagtaagatctttatcctctctagtcttgctgatcaaattgaataaaatcttgggataaatggggatttggaataatgactcctcctcccctgagtttccatcactttgaactatgtgataatctgtaatatacatattttttcttttctaaaagatgattctattattatgtgcttgacgtaaaaattcaatctaagatatggaaaagttggaggcttactataaaggacgatctggaaggagccaagaagactctctgaaagtgaatctattgaaagagagccgacaagaatttgtggtgagtaagaaaatgaaaaacaaaaggatagtgttacttgctgcatttaattattaggaaccaaaatgtacgcactatcgcaacaaaataaaatgaaaagccgaaaaggacattttcattaaacaaagataagattcaggacagttgggaatattgttgtacacgattttccaacaaaattcctaagttttgttttatggtcaattaagtagaattgtaggttataaaattttagaaatgaaattaagaaatggtaatagtgtgatatatagccattattctttttattggtttcaatcatctttcactaaaaatgttacgtgaaacataaatttatttgacagcattaaacagattattattttgtgacaatagtttctagaacaaaactatatatactacagtagtattaatttataagaaaggggttaaaagggaagaagaaaagtcgtgagagagaacgcgtccgcattggaggacgcagccgataaaatgttacagtcaccgagcatttcacattatttcctcattcgcatcaacgaagtcaaaaccatttataaacccaaaatcttcttcgatctctccataattctcgtttgcgtcattcattcatcacatatcaaccaccacagagacagaggaatagtctcaaaactttctcagaaatggcaggcagtaatattctccataagattaaggtactactctttttatgctttattcttcttatttgacggtactactttgagatgagatctccttgatctgatctcttttgagctcacttttctctgctttggacctggaatcagtttctctgttgttagctctttctttgattagtaaaaagtttgaaactttttttgagaaataaacaaagttttaagtgagtgagttagtcagataaacgaatgcagtctcaaggttgatcctttagctttatcaaataaaaaaggttgatcctttagaattttatggtttttggctgatccattagcttaacttttgaggtgggttttctctgaagaatctgtgcatagatctctgttatgcttatggtttgttcatgggggtgataaagaacttagatttagatgactccatgaaggcttttaactgatttggtttgaagaatccagtgtttcttgatcttgtgtggattcagtattaactctactgttttgctgtggattagttgaaggctgggttctgtggatctgctcctgacatgggaagaggcaaaagcaagatgtggaagaacatcacccacggttttcactgtgtgaagggcaagtccagccatccgatggaggactatgtagtgtctgaattcaagaaacttgaaggtcatgaattgggtttgtttgctatctttgatggtcacttggggcatgatgtggctaaatacttgcagactaatctctttgacaacattcttaaagaggtaaatctttaatttttgtcaagaaatctctttggaggccaaaaggagaaacctttgtgaatttttctgacttatccgtttgtgtttctgcagaaggatttttggactgacacagagaatgctataaggaatgcctacagatcaacagatgccgtgatattgcagcagtcccttaagcttggtaaaggcggatcaacagctgtaacgggaattctaattgatggtaaaaagctagttgttgctaatgttggagactccagagcagtgatgtctaagaatggtgttgcgcatcagctatctgtcgatcatgaaccaagcaaggagaaaaaagaaatagagagccgaggtggctttgtgtcaaatattccaggtaaagctacataatttgttctaactagttatgcttttggtcttcttggattaagtattaacgttcctaaaatgttgcaggggatgttccacgagtggatggacagttagcggttgcaagagcatttggagataagagcttaaagttacatctgagctcagaaccggacataacacaccagacaattgatgatcacactgaattcatccttttcgcaagcgatggtatttggaaagtaagtttaatgactcagtatcttactctgtttctaaccgtggtttagccagtttctggtctacttcttctaacatgatggacgatctttaactgcaggtattatcaaaccaagaagcggttgatgctatcaagagtatcaaagatcctcatgcagctgcaaagcacttgatagaggaagctatatctaggaagagcaaagatgacatctcatgtatcgttgtaaagttccactaatcttctcttcttcttatcaaaagctattttgtctataagttaccatcaagttgcaagatagagaaatatatgctcaagctgtgtctgtaaaaacccagtaatgaggtttcccagaagatgtaatatattatcgaaatcgcaacagccttaagatacaaaagaaagaactgaaattaaaaaaatgaaataaaacaaatcgcaacagccttaagatacaaaagaaagatgttcttcgtagttgttgtcatcttcgaatctcctcttctctgcagaaatagaaaaacaaaggacaaagtatattgtcagctttaacatacaagcaaaaaaattgtggtggatcaaaggaattaatggaacttacaagcgcatgtgtggtctctagacatggggaagtcagaactgaaatgacactggtcggaaagagccaaaacgtctggcttgagtgattcgatggatgtggtcagaaactccatacaccggcaaagcctgcgcctctccttcccatgcttacggcggcactgaaccaacggcaacactctgcggtgggcggagactcctgatggacgaagaacatcttgcactgttctagcatcacgttcgccacgtctacacactccggtggccaaggacggtacactgcgtcggtagttgtggctgcaacaagaagacacatcattgcaaacgctactttcatcatcatcctagccaaaatgtagcaattgttgttgttttgtttttgtgttggtcttattttatctctacctaacgtaatcgtgacactatcttaacagaaaattcaacttagtaacgcatgcgagattttaatgctttcggccgcgtgggaactatctaaaatttaaatataggcgtttctcgtatttgaaattttaaatggaccattaatggccatgttagtgtatgtgtgtggtgaaattgcgaactacatacagataacaaaaaaaaaagaaaaaaaatctaactttcttacatatgttagttttggaaatgcgtaagaccatatatcacaaacttgaacaattgtgttttatgtataaaaaaaaaacatgaataaatgtgttattctaaactcccatttccaagacgattaaagaaaattgggttttcaatatcgaattttatgttaagttatgaaggatttaaataagttttagagtattttaattagtactgtatctgtatgtaagtaaaactacaattaaaactttgagaaaaaaaaatcaattatacagaaaaaaaaacattcagaatacgttagaagtgggaacctcaatgttactcgtaaccttaaatggtcaccgaccattgcgcggatctagttgtttttatcgtggacgtcaaaaaacccttttttaaaattacctctctaatcttttgacgggaactacacttcgttccaatggccattgttttctcttaatttttgtttaggctaaacaacaacttcaaactgacctcaaatatctgttacaaaagttctgaatccacagaggatttaacttaactaggcgggatagaatataatttaggatcatagttaacaaatgaaagagacacctttgtctttctatccgaaagctcatttaaacctcggtatatatgtaaacattactttgacctccttcacaatgttgagcagattacgtgtgttttgaaggattggttttagggctggccattcttcatctgcatttagcatcgttacaaagctcattggaattcgaggatgactttttgtgttgaagttggctacggttcccacttgccttttttctctcttattaaattgcccattcacgaggtattgtagttttttttgtttttaacaataattttaaaagactctttataaaaagaaagaataactaaaagacaactataaaattagacacctctcgtgaatgcctgaatgacccatttcgtattgatcaataacatgaagatataaagacgtaccaataatcatgtatattttacggattaatctgtgcttatatatatctaagtgataatctaatttatgtttgtgcttgtcgctagtggcttatgggtagcatttaagtatgggttagtgcttgtctgagttgtgtctatgaactcgagtgatcgagcgcacattccaaactgaacacacaaaaaaagcaaaaaaaacatctaatttatgtttcatgcttatatatatgattccactttcacaaaagaataagcacacaaaagaaaaaacaaaccaagaggaagaagttcactcggagcaatgagtcaacacatgaaccttctcctgccttcatttgaaacggacaaagaggaatacgatgaacgcaagacaacagaccacggaggcatcggtggcagcgtctggaggttcaaaggcaacaaagcggccaaggaagcggctagtgtctcaatgaaaggtacacttgctaggttattcgactgctgcagcaaagacgtcaaaaagactattttgcctctgggtcacggcgacccctccgtctacccttgcttccaaacgtccgttgacgctgaggaagcggtggttgaatccttacggtctggagctgcaaactcttacgcccccggggtcggtattttaccggccagaaggtaattaattagtttctaattgtttcactaatatgttttcttcgaaagttatccgatactgtatttatatgacaaaagtttaacatagttctttattactatattaggtgaataagttagacgtagcactagttgagaagttactgcttataaccagtgtcactaggtgaatatggattggaaggagaaatattaagacatatgtagcactagttgagatgttactgcatgctgaagttataatcggtgtttaaaaacttggtttagattttactataacatgtgcaactatgctaatgcatgctcatattaatttagggcggttgcaaattatctgaaccgggaccttccacataagatacattcagatgatatatttatgacggtggggtgttgccaagggatagagacaatgattcatgccctcgccggaccaaaggccaatatcttgctaccgactctaatttatcccctctacaacagtcacgcaatccatagcctagtcgagattcgcaagtacaatctccttcccgatctagactgggagatagatcttcaaggtgttgaggccatggcagacgaaaataccattgctgtggtgataatgaatcctcacaacccgtgtggaaatgtctatacatatgaacatctaaagaaagtacgtgaaaagtgaaaactatttactttctttgaacaaaacttttgttaaacattttattatgacgtataggtggctgaggtggcgagaaagctaggaataatggtgatttctgatgaagtttataaccaaactatttatggagagaataaatttgtcccgatggggatattttcatccattactcctgtggttacactcgggtccatatccaagggatggctcgttcccggctggcgaataggttggatcgcaatgaacgatcccaaaaacgttttcaaaacaactagggtcagtttttcaatttctcaatcatcacacgttattagaagtaaacaatgtcctactggacatgatattaatttaacattttgtagacgtgagtctgtttgaacatcgagcaataccttgttgtcaataggtcgttgaatccatcaaggaacatctcgacataagtccagatccatcaacaatcctacaggtttgtctcttatgaaacttaatgttccatatgacacatgcacaaatgcaacgtgtaatgcgcaatagctaatgtgttgccttgtttaaattggaagtttgcacttccaaacatcttggagaagacgaagaaagaattcttcgagaagaataactcgatcctgagtcaaaacgtagattttgcgttcgatgccctcaaggacattccttgcctcacctgccccaagaaaccggagtcgtgtacttacttagtggtaccaattcctctttaccaacatatctttacatacgttttatttttaccttcacaacatatctttatacttaagatatatgctaagagaaatatcaatgcaaaactaacaaatacacattttctttccttttctttctctcgcctataatctatatgcactcctagatttgagtccaggtttatttattcgttaacaaactattatactacaaatccttattaacaaatacaactttttctgaaatactaattttctcaagtatctaacacaaatattttattttgtaacaaaaacatcaacaataatgaaaatgttaacatacatcacacaaaaggaaaaaagaaatatttcatatataagagaaacttcattaatcctaacgtaaattatgtatatatattgaagacaaaattggatctgtccctcttggaggacatcacgaatgattttgatttctgcatgaagctggcccaagaggaaaatctcgtctttctacctggtaatcaatatgaaactccttttcaggtaagcaatatttataaatataaaaattgagagatatgggttggtttggaatataatgcaggagaggtactaggactgaagaattgggtgagattctctatcggagtggagaggtctatgctggaagatgcattcatgaggctcaaaggcttcttcgctcgccatactaaaacacaactcacttaaaaactcagcttcattctcggaacctgagaccctatctttctatatttttgtattactctgttcattttgttttcgaaacgttgtgtgtgctatgcttttctgttggaacgtcgttttattcgaattaaacatgatgacgaagcttttaaatatatttaacaagattcgatatggggtcgagaattatattaaaacactttgactaccatttatttattatgatacactttttcaaatttacttgaccctaaaatttttggatatcaaattattcatcttacactatatacactggtcaattttggatgaaacttatatgaataatttattaaaacttattacgataaggctagtccgaatccttcttacacgtactttgaaaaaaaaaacttgtcatttgtaaggcatcatcaatattcttacgtttcacaattcatcttcttctaatattatgtttcattggaatccgaacgacggaaatttcacgttaaaacttttggcttcttcttttttttggtcacgcacatcatctatcatactttagtattatcttcattcaaagtctgtaattcaaagccgtaattaattatggtcacgcacatcatatatcatactttattattatcttcgtcattcaaagtctataacttcagtttactattgacaatctgacgtactgacatagacaaagtctacgcttgacaattttagaatcatgcatgaaccaaagagttccgattgttttacttcttcatctataaatatctttgttgacctctcttcatataaacacaacatttagatttcaatagctacttactcccaacgaatatattcacaatgaaccacaacagcaacctcgttcttccttcccatcaaaccgagacgcagacgcaagatgaaaccgatatcagcgtttggcgtttcaggggaagcgacaacgcagccaaagcctccagcgtcacgatgagagtcatcgtctacaagctcttcgatgaatgcagcctggatgtgaaaaagcctcttttaccccttgctcacggtgacccttctgtctacccttgttaccgcacctccatcctcgtcgagaacgccgtggtcgacgtccttcgctccggcaagggtaactcttacggccccgccgccggaattctcccagccagacagtaatatactaatatttttctcttactttactcttaattactttgttccacccactgtaagtctgtaaccattcaaaacctaacagtattttcatggaatgttttgttaatcagggcggtcgcagattacgtgaaccgagacttgacgaacaaggtaaagcctaatgatgtattcataactgtcggatgcaaccaagggatagaagtagttcttcagtcactggctcgaccaaacgctaacatccttctcccaaggcctagttaccctcactacgaggctcgtgccgtctacagtggactcgaggtccgcaagttcgatctccttccagagaaagaatgggagattgatctcccaggcatcgaagccatggcagatgagaacacagttgcaatggttatcataaaccctaacaacccctgtggaaatgtttactcttacgatcatcttaagaaggtccgtattcatacttttaattagctttgactcgtgagagactcgaaatattggtgctgatgaatgaaacctttataggtggcggagacggctaagaagctgggaataatggtaatcacagacgaagtttattgccaaacaatcttcggagacaaaccttttgtcccaatgggggagttttcttcgataactccggttatcactttgggcggtatatcgaaaggatggattgttcctggttggagaattggctggatcgctttgaatgaccccagaggaattctcaagtccacaggggtctgtcttcctttttactgatcatcatactaacttgtgtttttgtcgcttgtgttacaagtaatcactctgttttttcctttttcttgtaacagatggtacagtccattcaacagaaccttgacataactccagatgctacaactattgttcaagctgcacttcctgagattttagggaaagcgaataaagagttgtttgccaagaagaattcgatgctgaaacaaaacgtggaattggtctgtgataggctcaaggagattccttgcttggtctgcaacaagaaacctgagtcatgcacttacttattggtaccaccaccaacgtctcttatactctttcatgattctagatcaatttggatgattcttatttcttaacaacaattaaactgcagacgaagctgaagcttccattgttggaggacatagaagacgacatggatttctgtatgaagctagccaaagaagaaaacctcgtcttactaccaggagtggctttgggattgaagaactggataaggataacaattggagtagaagctcagatgctggaagatgcacttgagaggctcaatggcttctgcaaacgccatctcaagaaaacagaatcttcttttcaagctctgagcaatggcaaaatctaaaccactcatctatagagagactatacacaaccaaataaaaaatctgcaatttttgtggtgtaaaaaacaataatcatgtcattttcatataagaaactctatgtttcttaatcttatttctttgtttgagtcaagtagaaaaagacatgaataatgttgaatcaagactttatctttaccgttaaaagagacggacccactttgccgccgtcaaatttaaaaaatgcaaaagatttgtcttttactttctttcttcatcaacggctctctgatccacagtagccggagaaaaagcagagagctcaaattgtcggaattaagaatccccaaatcacatcttcaagaaccctaataaattcccagagattcctctcatttaatcacttcagattcgaaaaaagttctctctttttcccaaaaaaaactttctcatacaatggactctactaccacacctccttctctccgttcgaatactagatccgctttgcgtctagctcgaaacaacaaaactctcgtaaaatctcacattccatctctcgatttggttttattgtctccgaagaacaacaacggtactccttacccatcacctgtttctctcagttcaccatcttctcctgttactcttcgtgagattctccttttatctccttcccctcttcgtaaatcgagaacccgtttaagcaatcggttcgatatggaagctgcggaggctgctgtgacggcacgacggagtaagacgaagggagggcaaaatggtcttttggcctcgccgtcgccgaggaatttccggaggtcgagactaaggtcggaggcgatggtagatacaaaggaaaatacggagccaattgttgtcgtgaccgatgaaaagaaacaaaaccagaggaaacagaagaagttgggtcgatctaagaaggagaagcacagttctgttcctctgttagcttctcctagtccatcttcagatcaacgtatgtccttcctctgtctattagctcattcgatttcactttcgtgctctaataattgctcaatgatttgtgtaattcagctcaagatgtttgtcaaggtgatttagagcggattagagagaatataagcgatttgattatgtggagagatgttgcgaaatcaacactttggtttggttttggctgtatatgtttcctatctacttgctttgctgctaaaggatttaactttaggtaacattgatttctctgtcaaggtttatctttctagctttaatcatttttcacattcatgagttgataatgaaactttgtgtggtttgaagtgttttctcagcgatctcctatcttggacttttgtttcttggggtatcgttcttgtcaaatactcttcgccaaaggtacaaacttttaaggtcccagtacataaatatcagcttgaactgcagttgactgaagttttgatccatttgttaccataaagggttactgaagaagcgcggagagagcttaaattgagtgaagatgatgtattacgaatagctagacgaatgcttcccatcaccaatttagcaatttcaaagacgagtgagcttttctctggtgaaccagcaatgacactcaaagtagaatttacaaaactttgccattctcataaaacttctctccaatgaatgtgactctcacgttgattttgtccttcttacactgtttttactttgatttcaggtggcaccttttgttctaatgggagctgagtatggttacctcataacattgtggagattatgtgcttttggtatgattgttgaaacactatatgtcaacattactccaaagaaagctaaactgttttctttagttgtatctagtagaattgacacagagtatgcattgtttctttaaacaggtttcttccttagcttcactattccaaagctatattcatgttacgcaagtcagcttaaccaaaaaggtaaactctattaacagactgcgtagctctttgatggttccaatgattgacactaaggattctttgatctttgcttatgtgtagttgagtgtgcacaaaggagatttgttgaagcttggggagtttgcacacacaagaaattcgtagcaggctctgcagttactgcattctggaatctaacttctctcaagacccgttttattgcagtgtttatcatagtagtagtaatcagatacagacgacagaatctacagttagattccgaggatgaggaggagaagaagcaacaagaaaaaactcacccggagcaacaaaaatcgccggaggataagtcaacttcaccgcggtcagcagaagaagagcaagcgttggtgctagttgcagaaaccaaagcaccaaagaagctttattagtctagtcactagtgtcttttcagtatccacctgtgtaataatatttcacatttacgtaataataaataaagagcagtcattaatatcaaataataaattgacacgtgacaagctcatgaaactgtgagaagcaggtgataaaaactctcgtccgtcttgggagagagcacatcgtcgtcttttctttataaaccctaaattcccatttctcttctccaaaagttttatcgattccaccaaattagggcgaacgcgaaatctgggtattgtaatttgaagcgatggcgacgactggaactgctgcggttgcgacgggaacttcgacggtgaagagaaaaccggtgtttgtgaaggtggaacagctaaagcctggaacgactggtcacacgttgactgttaaagtcattgaggctaatatcgtggttcctgttacccggaagactcgtccagcgagttctctgagtcgtccttctcagcctagtcgaatcgttgagtgtctcatcggtgacgaaactgggtgtatcctcttcactgctcgtaacgatcaaggttattgtttctccacttttctcttgctttatggatatagaaatggtgtcttcgtagtttattagagtgataagtcttatcctttgttgttctctcgtttgtcttaatcaatttctattttgagcaaatggtaaatgtgtttctattagtactatttggtaaatgatgtatcagttattgtatgtgtatttagtgatgtctttgtgaaattgaagcttgaaagaatcttggccttgagggtctgtaactctgtatagtcttacctatagtgatgatgaaacttgcttggttagatgttgagttatgttcaattgaatggtctacattatcccaaaactttcatagcttttcataatgtgaagttttgttataccagttttcgtgcaattgatgtggctactgattagctctaatgatgttattggttttttttgtgtgtgtgtgtgtgtgtatagttgatcttatgaagccgggtgctacggtgatactgcgcaattcaaggatagacatgttcaagggtacaatgaggctaggagttgataaatggggacgcatcgaagccactggagccgcgtctttcactgtcaaggaggataacaatctgtctctcgttgagtatgaactgatcaatgttggtggtgatcagtgatcttttagtatgtttatggaggttaacccctgagagtgttgggttctgatttttctaccgtgaaggtctttgatttagatgatgaagattgtatgactggtccagagttgcttgtaggaatatgcttcttcttttttaccctaaaatatgcggtcatgatcttgctctggagaactattgagcctgcggtaatggcgtaatgcaattgttccttttaatttgtgttgatgtaagttaaagaccattgagagcttgcttgtgcactatctaatacagtaaaaataagtttttctttcttaaactttactaatgtctttgttttttcattaattactatttgatgtacactattgtaccctctcggttacagagagttttgcccaactttttacatcgaaagcatctcatccttgattaatgtcattgttaagacaaattgtaagtgcataaaattcatcgacggatcatagaaccattgtctagttaagtcggtctaattccaaactttataaatctttgaaatcagaatgttactttgaagatcagctttgtaacaccaaaaacgaatagttaatgaacacaatacgtagtgaagagaaaaaagaaaacgaaatgggtaataacttaatggcataaagaaaggcttacaacacagcaaaaatgttcatgttcctaatcttaccctcactataccaatacaatcctctccacgtatcatcatccttgaaaggaacaaacggagaaagagtagagtcactccacttctttgatgatctttcttttgcgcagaggtgctgtgaccactgttcctggagcactgtgagctttccttcgtgcttcttttcttctcttcgaatcgttcacagttcgaatgatacccatcgctttgtatattggttttggcaagtgcctgtgtctgtaattcacaataaccaaaacgttaccatgttactatagttatcttttgacaatctccagagttaaagcatgggataaaaccacagttttcattggtcatttacctcacaatgcgcttaacctcagaaagatgcttgtaccggttcttcacagcctcgttgtactcatgcttcttttgttcccttggaagaatctgcagcacaacacaccaattaacattgacaattcaccgttccaagttaaaacttcttaagaaagcatgtacgagtaatatctcataatcatatgcactattggatcaactgctaagcctgtggtaactcttttttggtctttattttgtataaattcacagaatcttacaactcccaattgctctgatgcctttgccttccatagcctgagattggtgtcatcactgcccgatattacatatgtagcatcacagctatatttgacacagaatactctacaagaaaaaagaaatgaaatttagaaattgcttagactaaatcaaattaccaaggtggtacactagaacatctgaacttgaagtatatatagactgttcagtagattgtacctctgcatcctctttgtatggtagatttccctgctgtgtcctccattgtatgggaagattctcacagatcgatcataagaacccgtaacaaactcacgaccagtcggtgaaaagtcaatatccatcctgaaaaatgatgaaattagataatcataatgcatttggatgatatcttgttaaatattatagctgatacttgagataaatcattcttcattcttacactgcagaaacatgatctttatgcacgcacttggcttcgtccaactttctaccatcaaagctatagcaacttccatcttcattagcctattcagtttccccatgggataaaattagcacataagcaaaagacaaacgctgatttagcatagcccatcacagaaaaattcactttatgattatcacttacagctgtcaggttcataggctccatggggttccatgcaattgaatttgtttttgtctgccaaaagaaaagcaattagcagaccacggttgcaattgtttagtttgaagggtattaatgattaaatatgacgagaatatgtaaaaaagtttcaactataccatcatgataattttccttgccgcagaagacaagcggagatcatatatggttatgctccggtcactggaagaagagatatccccttacagtgttagagaaagctctggaaggtgtagcacagacaattacatgacatatacaagtataaagtagaaagaatatacctagctgatgtagccaataaattaggctctccaggattaaaccgaacagatattacagagtcagttccccactggaaactctgaactggctgagacctaattacaaaaagtaaaaccataagccctgcttacgtaaaattaaaacaaacaccaaagatttcttttagcaggagcctgagtacctattatgattccatatatcaagttgagctccggccgtagcaaaaaggtcaccttcaaactgatgatcaacagccctagaaatgacaaaaagcttagtaactcaagttttttgtaccaacagaatcatgagaaatcgcataaagagtgtgtacgaagtctaccagaaagcattcttccagacataggttgcagatggctgaaaaaatagtttgttaaaagcttgtagttatataccagcaagagaaagctccagataatacaatattgaaagaactacctcaatgaaattctcagatgaaatgctagaatcttcaagtgaaggacgaggaacattccacaaacgaacactgcacaaatccattaaccttagtttaacagccaaaaatctgatcaccgactggaacaataaattgttattatatcttacgtgcaatcagttccgcatgaaaccaatacatttccatcggttgatgcagtaagaccacgcacagcaccttgatgaccagggaattggcaaactgtacgcctgcatgtttcaagttccagaattcatttaccaaaagcacagcacaaagcaaagcctttaatactaaatgaagttcaaattaattcagaggggatttcgttttcaagattttaaccttgaagagatatcccaaaggcgaatatctgcagagaagaaaacgatacatagtatcagtaacatcaatggatacaaacaaccagcttacataaatatgccattagataattacctccatccatagaagcagagaagattcctttgaggtaatttgggttcttcgccatacatgagactccatcacgatgaccatccattgctccaacaaacggccttgcaaatatctacagaaaaacaaaaacagagccaaatttggggactgctccataactaaacaacacagacaatcaaaattgaaactcaagagcacaccttttctaatttggcagctgtaagagctctctggtattccacggccttctccataggtcgaagacttgggtcgaagttgtgaaagacccctctggaaacgaattgataatgttattgatagtctaaagctaaattttgtgatatgggaaacgaattggatatgcaaaaattacctgaagatcctgacttctttctcgagtgtattcatcaaccgatcttgataacgtcttaatcttcattgcttaatactacaaaaaggtcacgacgaagactaacggggaagagagacacagagagatacagagtcaaaagtgagctaagttctccagacagaaaaaccctagatgagaggttttgggagaggtgacgaatctgagatgggcctaacttaaaaatatttagtccttaatgggctttttataatttattataattggcccaaaagttactattgcaaaacttgctcgagtttaagtttttctgttacaaaatgcgggacatttacaaggttagtgtttaataatttatcaaggagttgagttctttaaaatcatgaattcgagtacggccgataacaaataattgattcaaactatttaaatctgttttgatccaatccgaagatgttattgtaaacaaaactctgaagaattctctggttacctaaaatgcatgactttgaatacaatatcattaccgttggacttttactagtaaagttggttaatacaagactattcttcaaatttggacaagtcaagattctcgtgttttgaattttaaggtttcttataattaaacagtcctttaaaatatagttgaattcaaagaacactcatatgcttgtatacattttatactatttagcaacaaactcacacaagcttttcaagtattcaaataggaaaaaaccacctaccaaacactttactttgttctctaactacttatatacctactaacgcagttgatacgtaattttatcttacatttcaacctttttcattaactcataatggattattgtccactcaaactacactgacaagagaattatttaagtgaaactgtgaattggtcctcctacggtacttttatttagtcaatggtaacttacgcgttaagtttcaaatttcatataagacttttcagaacgaaattatgcctatgatatattgcgaaatttcttgaaatattttattgatatgtgattctattaaaataaatagcttaaataagaattgtatctttgaaagatacaattgctatcaaatgatctagtataaattaatcattggtaccgcgtaaacatcttgataaaattgcatcaattagtttttcgaataaaacacttgtttttaaaaaatttatgtgtaaatataatttcgttaacaaaattctcattgattattttttacctctaaaaaactaaaaaccaccaaaatgggtataaatgtaatttggcacatcgtaaagtgtcataagagcgacccgttcaagtcataatacttggtcaacacgcaaaatcgtgagctagcgccgggaaaacccgacctaagtgatgaactctctcaagtcatgaccgcttcctcgtcaaataactataaatattccctctcatttatttgatttcccacataaccatatctcttaattttctttgatatcaaacaaaaaaaaggcttctgttttattttattacttgtcggtacaacataaagaagagaaagtaaaatacgatgagaagagttagttggtctactgttttgattgtggttgtgatggtgtcgttgtttttcgtagaacacgtggtggttccggctgcggcggggagggttcttactgaaaaatcgggagatggaagtgcgactatgacggtggagaagatgaaatcgacggtggattcttggtttcagcgtttggcgtcgggtccaagtccaagaggtcgcggccattaaattttccttttttactttttttttcctggccggaggagattaattaatctcgatataccccatatgtataccagaacaaacggtgaaaactgtattccattcatttatttcattatttgttttttttttctttaggcaaagttcatatagttagtgacagaaactaaaaccctcaatatacatgtacatgatttttgcttttgctggttgctaattttaataagattttatacttctggtttatgtttgggaacgaacttattcaaaaaaaaaaaaaaaagatacaccgaggaaacaagtgagtcgtgcacgccatctatgtaaaattgtaaatatgtagccgggctagctgggtcaccctttcaacattttaataatattacatagttttggccaaatccggaaacaacgagaggagcctttgcatgtcacaaattgaagttggagtgcgtacaaaccaagaacttgaagttccagggcagcaaaccaaagagcccataatcaataagccaagtttatagaaacgtcgaacgagttgatttgaaggagttgcaggttaagagaattggatttggaaacttatccagcttttagaatgcgatattaaagtagtgcacaagaagttcctatatattgcaatgaagctattttttcttttaaaaggagagattgtgaaccatttcctgggaacagacgggaataaactaaaaaacttttgacaaccgtagtgaaagtattcaaaggctctctctctttcttcaaatgcttgcaactttggatttactcctctctgtagtctggattttccttcaatatgacgaaaccttctaatatgggcgacaacggaatgtacctgtgacccaaaaagaagcagagtttttttagattccaatatgtaaaacagagttttatttcgagtaggataatgtaacaaggggattagaggaacaacatacttctcggttgcgagttcagctctctccccagcagcaaggagaacaggtgttgagtgcgtttggaacccagtgattgtcttaggtcggcctgcctgtccaaccacatcaaccgcttgtcctacccgcactggcaccgagatgggcttcaggctctgatccaccgtcagcatcatccttggctacacactcaaaccgtattgtgttagtagataaacttagttcattaaaaaaaaagtcatcagacagaaaattgcactcacctgcatcgccaaaacaaggaagtagagcacatagtgatatttccccagtataatggatttcatgtcaaggcatgcatgcaacaatgtcactataccagcaagtgcggttctaggtacaaaatacaacacccaagtttaggattcacaaggtggagctttgaaagcaaagtatacataaaatatatgttataacttacggcatagcaagagccgttcggagtggaaaggattgagagttaagagaccctttcccatatgcacaaacccttgagcgatgcgcacctgcattgtgacttaagacaatgagaacaagcctatcataagtagaaaccgtgtttattccatgaaaacttaaaaagaaatcataaaacgttacacagaaaagaaggctggcatccttgtaataatagctggagagatttctaagcatgccagctatccttgcattgttggttccagcgcctatcaatccaagggagataattgctgcctgtaggaatcagatgaaacatcagtccaacgctgcatagcaagtcaaagaaataactactctacctcaaccatgagtggcgaaaagataactcaccattgcaacttctgaatctgtgtcatggcttagtctgctcaaagtgtccataacagtcacctggaattataaaaaagttagagagtaacaacagtattcttaagcagaaaagtaactgcacgccgccgaaaactagatatgcaaaaataatactcacctttgggtttgatatacataggagaccaagagccaaaggcactgcacgtcgaatgttctgctctccatactgtagtacgcgctccaaagaacggatctccatatccagacccaattcctcagacatagcaaccatagctaatccaatcacagctggaccctggtggatatcacctttcaccagatgctctccacactgagccagaaggtcttggacctgaatagtttgaatagtttgaagagtcagactaaactagaaagaagtgaataatctaattcaaccactagcacacttgatcagataccttaaggacattcccggttccagcatatgcacatgaaagaagtgtcatatcacaatactttctgattttctcattgaacgtctttgaaacttctgcagtagcctccacactttcctgctcgatattggaacaagttaaaactaataatcggggaaataacgatcaagtacacgaacaagaaaaataatcaagtatgactggctgcccacctgtttgccaaggtacaaaagaccaagtccaagaggcaagaaacgagtgagggcttcacccagctctgcctcgctccgatccatcaaagcaaatataatagattgtgcaacctcttcgttacacgaaccaacataaatcatccccaaactaagtgcagcaaatgcaatcacatcgagaggtgcgttggcatcatttagtattggagacaacctgatttttatctatccaaacagtgagcatgttattgtctcgtcaacagaacattcaacttagcaccataggtaagaagataacatgtattcacctgatcattttgggaacccgcatatgcaatcccgagacccataatagcaccaattcggacagatgaatcctcattgtcaatataacctgaaagaagggcaaatgcctgagaaagagagctgagtgagaatgaatggcgaaaaattgtgacacagaggttcccatattaaaaaaaaaaaaaaactcacagggtcacaatcattcttaatgccacaattaacaatcccaactcccagcagagctccagcaacgacgggattatcgttactatggaaatatttgtcgagatgacctagtccggtctccacatcccacaattgaatcataccctagaattgttgttaaaacaagttcgtgttacaattttacttccaaaataaaaacatagctaatcaatttatcaagtaagatgaggtataccagactagcaactgcactggtctttccatgttctttatttttgaagagccagtttccagccgatccactggttgagtcagatggtactgtcattaatttgtcctgcaataaggaaatatatgaaaagggcagcttccaaagttcttcttatgttgcacattaagatcctgtaatcatacctggccgaatccagcatttacaaatgcattcacaaaagtcgcagatagattttgcctagctgagtccacacttggaccagagctagccctaccatcaagcaagtgagcctgcaaatttcagtggacaggtaagaggcacttccataaacatatcctgtaaccaaataaaccagtaacagacataatattcaattaaactgatataccttgtagatgtcttcaggcgtcttggcctccatgacctcaatatccctagcaagcgtcagatatccttcactcaacttagagttgttaacaatatcctgtagcgcttctttgtcttcgtcatttgcaaccatctcttggtcaagctcaaaggtcataccctgcatggagaaataacaagagaaaaataaatataagaaaataaaaaatcaggtactgcacctttatgctaatttaaattattaagaacttacatgacgtgcaatcatgtagcagaactgtttcttttttaccagatcggtacatgaggtaaatacttgcttcacatactgcacaaaggaaaaatatatatcataagaaaaatacataagttaaagaagagcttttcccagctgctcccatgttgcagaaagaggatattaagttttatatgaagattagaaccatacctgcatgttatcaagaaataatgcaatttgcagcgcgtttggatattctgcaaacttaatgtagatcatgtaagcaatatctagaaccaacatgtcatctggtcctggaagatacctggaaaaaaacatacaatatcaacgggactgataatgtgcaagataaccaagcaaagctcatgagagcttgtctcatatgaaaataacataattaagggtgaaacgccagtcgaatgaataagctaaacatattgaaattactttgctgcactcgtgagatagttgcacgtcctcctgaaatttgtattgtcaacatgctcaagtaagagatcaagatcctcaacatccattaaaaggtcaacagcttcggtttcggcattatgctgcaaagaacaaaagggaatccttcaaaaatgtgaacaaaacaagaggcgcaaatttcacgcctatcaatgaaacttatattaatatacaatggaccccttgttattacaagaaaagtaagaatgacaaggatctcaccttcatgtgaaaagaaacaatttgctgcacaagatccattaagtcttcaatagaggactcttcaccctgatataacaaaaagaatgagcattataaccatattcagtaacgagcccattgtcataatattcattaacaaaccataatatccatgacgttgccagaatatgagtgaaactcctcgagctaaagaacattgccaaagaccaaattgtttactaacctgacgtattgtatactcttttgcaatctctccagccaaattcctgacatactcgtgaccccacgatccgatgtcactctctgatccattcaacctatagtttaagctttcctgaaagagtattgcataacaaaggatcagcaacaaatagcttaagtcaaattctaccaagaaccacaaaacacaaatctggtaaggcatatcataagaggaaaacaaaagggaatctagttaaatgaatgtgaagcaaatagcaataggcaagaaactcctacaacagtagcaagaaagcataccctttcaccttcagcagacatggtcagtgccaggacagaaagtatatcagccaacattttctgcaaaaacgagtgcgatcttataatccagactcagtagaacgactaagacggtgttgatgagaaatgacttaaaatgtttgaaatcgtactttgagatcagactctgccatttttgcatgaaattctttaagaactccataatgagggcggagaaacttgaggggttttggaactgatgtcatggagcttgttgagtcacgaatttccttcctacataccaaaagagatcgatcaagattagactatgaaaacagtgaaagcactaaaagcagcaaaagaagtgtcataagcccattaaagaaactccaatagaaaattatcagaatatttgcatctaatcaaatcaaggatgggtttaagagatacaaaaactacctcatgctttcaagagcaatcttctgtaactcaggattggggtcctgaactctctcaacatagagctccagattctgctttagttgcaagtcctcttcagactacaataacatcatatgcaaattgagtcagctgccaatcaaaccagctaaaaccatagccatagtacaaaagattcctattaatttaactccatgtgacttaaaccctaacaagaattgtatcttcccagaacgagttataatgtggatttaaccaacttcttaacctcgctttctaaatagcaatgcgacattcacaatatatcagctaaaccgtacatctcggaaaatctacagcttaatcgtgagttttttccgatctccctggattctttctaactcagctaagcacgattccaactaataatcgaaatcgatataaagaaaactcaccagatcctcttcctttttatcatctttcttcttggaatccttagaaggaatcttcgtcgtagcttcgtcccgcttcgcaccaccgccaacactgttcggatccggaactggagccattgtaagtcagactatcacctgatcaaatcaacgaatccaaacaatgagtatcgaaattcgtaaaactcggaagaatcgagcagcttctatcttatgagctctcgcgtaaaccctaagtctctctggaatggctcgttagagaagaactatgcttttcttcaggaactgtagcaaaaaggttcaactgtaaaaaataaatactatcagataaaaaaaagtacttatacggaagaagattacccctcgatcaagaattccattgtgggctcagcccataataaattgggctattcattgggccatagtattctactatggtctctatataaaacaccttgtctttggcaaacatctctatatataatcaacactttaaaatttattttatttgggcgatatagccaatcacaaaataaaggactccaaaaacatctattttatcggatttacatttgatcaatttaaattcgaagcaactaattcgatcggatttaaattcgaacaacataataatagcaacatttatataaatacgttacatgtcttagtcgacatgttcttttatggtaaagttagcaatattagtcgaactcaaacatataccttcacataatgaaagaggaaataacatttaattgtttttataattaataatataaatgggagaatctgaattacttgagcgataataaaagaagaaaaggaaaagaaatggagaagggaagaggcaagatggcaaagctgtgatttaaaacaccgtcacctccccgtcaacggagacaaacaaagatcgtgttttctcgaaccttccacgagatatactaagccaaagaagaagaagagacctgagacgaacaagaaatccagaaattaccaattccttttttttgtttaatcgaattcaggaaaagtgaagaaacgaaagagagaagacaaagaagaagaaggtgagatgggagttgattattacaaggttttacaggttgatagaagcgctaacgacgatgaccttaagaaagcttatagaaaactcgctatgaaatggcatcctgataagaaccctaacaacaaaaaagacgctgaggctaagttcaagcagatctctgaggcctacgatgtatgtgtttgattcctccactgcttttgctttattgaaatcgtccctaaagttttgatttttatttctattgagaaattttcattcccttgatactgtcggtggtcacgaacttgtttctgatttttgatatgagatgcaattagtctgatttcacgatttgatgttgtgttggttcgtggggtttttagatttcgtgtccctgagtaattcgaatcatagtatatagtaaaagatgattgctttatatttgggcaagctaggttatctccaaagctcttaatttgtgctttctttgctgatcttctgagtcatgatttatccgttttcttaactctgtgattgattattgagaacctcttaggcactctgtacttgtcaatgtgtagcttaggattatgaggaacatactaagattgtttgatttgactcaggcttttatgaggctaatgttggtttttgttgtgagatgattaggttcttagcgatcctcaaaagagagctgtatatgatcaatacggtgaggaagggttaaaagggaatgtgccacctcccaatgctgctactagtggagcatcctacttctcaacaggagatggatcttcgtctttcagattcaacccgagaagtgcagatgatatattcgctgagtttttcgggttctcgaccccgtttggtggcggtggtggtggcactggagggcagagattcgctagccgcatgtttggtgatgatatgtatgcctcgtttggtgaaggagcaggtggaggaggagctatgcatcatcatcaccatcatcatcatcacgctgcagctaggaaagtggctcctatcgagaacaagttgccttgtagccttgaagatctctacaaaggaaccaccaagaagatgaagatctccagggagattgtagatgtcagcgggtaagtgattgaactcagataccatttcgatcacacttataacattttgttattaggcttatctactagtcaacctagagcatggttttagaaatatacaacctcccaagtcccaagtatgatgaacatatatgaaacaaagtttcaagcttttagattctgcaacattccccagcttccatatggttaattgttgatttgagctgaccctagttgttgtcttaacaatatctaatatctgtcttctggtaaatgcagtaaggcaatgcaagtggaagagattctaacgattggagtgaaacccgggtggaagaaaggcacaaagatcacattcccagagaaaggcaatgagcatccaggtgtgattccagcggatctagtcttcatcattgacgagaaaccccatccagtgtttacccgtgagggcaacgacctgattgtcacacagaaagtctcactagctgatgccttaacaggctacaccgcaaacatagcgacccttgatggccgtacacttacaatcccgatcacaaatgtgatccatccagagtatgaagaggtggttcctaaagagggaatgccactccagaaagatcagacaaagaaagggaacttaaggatcaagttcaatatcaagtttccagcgagattaactgcggaacagaaagctgggtttaagaagcttattgggtgatgattaaagcatctctgtcttgtgatgtgtggagattgggataaatttggtaatatacaatttatagggaattatctccctcttcattaaatttcgtgttgttaaacaagtcttctttttaaagaatagttttttcaagatttggtacatgtcctccataaacaaaaattgaagatcacaaatctttttgttatacaaaagtttttcagttcttgtctagagtatgaaattattctttggtaaggggagatccgatgccatgacggcgtgtagggaacgctaggaagaaggcaccacaaatgacgccgatgacaaaaggtaaactggtaagaatctccttggtttcctcggaaggaacggggaataaacaacgggttacgttctgatcaaacatggagactgcgaagaagacgagcattgacatgattgcgtgaataaaatcaagaatcttgagcttatacttttccttctcctcctccgttaaagtaatcgatccatccatcactaatagcccactccacgttgccaacccgtacctaacctgcaacattaagtttggtgcttatgtcaacaagttgttatgaatggtacaaaacagcggaaaatgtgacagagatatgtatatataccttgccgtttgggtctctaatggagtcggtaaaggagaagaggaagcaggagatggcgcataaggagacgaggaagcaggtgagccagcgactggtgatggtgggacactgaccttgatgggttaggaccggacacattatttgaaaactcattacagaaccggttgggagcagatttgatagatgagctgttcctttgaatgttttcctcacaactctctctactttcgactttggttttcttggtgccgacggcaacgatgctatcaatgactgcttcgtctcctccatcttcaattgttttttcgttaatcactctgcaaattcgaatgattatatatgtttcttttttttgtctctatggttaattctgatttgaaagaattgcacaagattttatgggtttcgatttctttcttttttggtgtttgcttccgttgagttgtttgttcaggtttcaaggttgatattctgttcttccatttttatgtttctgttgcatgtcaggattagcaataaaaaacgtaaaaaccaaataacatttgagtaacgaaacaagaaataggagttttgtaacagaaaggattaaactaaaactctgtcaccgtttcctaagaagatatatcattatcaaagttacttttattatattgatatagtaaaactttgctaaactagtaaaaactagtttttcgaaaataatctagattagaattctccaaagacgtggcttaattctaatctgtctaacgtatggaccataaagaattgtattaaattggtctttgaacgaatttattcttcggctaaaagaggttatcggttgtgaagtggacctgcaatttcatttgtttgttcataagaatatatgaacgagaacttaggtgacctctatttcatataacttttacatactgcatactggtaaatcatatgaaatatggacttttaaaacgaaacaaaaatcacgtataaccctattagtgtatatagagtctctgttgtgttgagactctgttgtgttgagactctatatacactaataaaccctttttacttctttgttccatacgaattaagcttcagaataacagaatttaagagaatatcgttattaacagcaaaagtccaaaacaattaaaaggcagagtgcttgtggagacgtaaagggaatgcaaactaagaagaagaaaagtcattatcgttagaggaccaaagacttaaacattattggattaaggtgacatcatagtgcatagtgcgttgtaccatcgcgcaaactcgtgatattcgatcacggattaaagccatgatctatcattttctcttctttccccccttaaatctcgttgttttttcaaatcatagtgactgttgcttttcccatcgaaatgaaagtaatctaacaaaatctactgttagatcatgtttctccgaccaaccaaatttgaccttgtctacatatacacgtggcttcacaaatgcgcatcaagcaattggaacttggaagcatcactatagttctaaacttccaattaaaagattgttagtcaatctagggttgggatcataggtggctaagttttcggtttaacaaattttcgagatcatcgatataaaatcataggatatgtcctcatcacaatacagtatacacacacacataagtgattaagttatgcattcataacattaatccagaagctttatatgcagactcgaaaagtcaacataaatccagcattacatggcccatttgtctccatcattttgaccatcatagcatttcagttgacttggagagtgaccattggtccattctgtttcttttcaaatgaacaattaaatgtttgttcatttatcaaaaaaatattttttataaaattaccttatgtaattattcataatccgatttttttttaatatcactttacaaatttgtttatgatttatatgtacagtagtactttgctccgtaatcgatttcacatggatgtatactattgcctcctaattcttccaatatcggaaaacatgtctcacccatgtcttgtcacagtgctcgtttccctttttgcttctacaattccttataattaccaatccataatttcgttttattcacaaatccaaagcatgaaaaaagaagaataacgattccttttccaaaaaaatgctttattgtcttattctcctcctatgtctctcttctacgtatctaccaagtctatctctaaaccaagatgccaccattctccggcaagccaaactgggcttatccgacccggcccagtccctatcttcatggtccgacaacaacgacgtcaccccatgcaagtggctaggcgtgagctgcgacgccacgtcaaacgttgtctccgtcgatctctcaagcttcatgctcgtcggacctttcccctccatcctctgccaccttccttctctccattccctctctctatataataactccatcaatggctctctctccgccgacgacttcgatacgtgtcacaatctcatcagtcttgatttatcggagaatctattggttggatccatcccaaagtcacttcctttcaatctcccaaacctcaagttccttgaaatctccggaaacaacttatcagacacgatcccgtcgagcttcggagagtttcgaaagcttgagtctttaaacctcgccggtaacttcctctccggtacaattcccgcctctctcggtaacgtcacgactcttaaagaactcaaactcgcttacaatttgttttctccgagtcaaatcccgagtcaactcggaaacctcacggagctccaagttctctggctcgccggctgcaacctcgtcggtccgatacctccgtctctgtcccggttaactagtttggttaacttggatttgacatttaaccaactcacaggatctatcccaagttggatcacgcagctaaaaaccgtcgagcaaatcgaactattcaacaactcgttctcaggcgagttaccagaatccatgggtaacatgacgacgctaaaaagattcgacgcgtcgatgaataagctgacaggaaaaatacccgacaacttgaatctgttaaacctcgagtcactcaatctcttcgagaacatgctcgaaggtcctttaccggagagcataactcgctccaaaaccttgtcagaactcaagcttttcaacaacagactcaccggagtattaccgagtcaactcggcgctaactcaccgttacagtacgtggacttatcgtataaccgattttccggcgaaataccggcgaatgtctgcggtgaagggaagctagagtatctaattcttatagacaattcgttttcaggagaaatctctaataatctcggaaagtgtaagagcttgacccgggtccgattgagtaacaacaagctttcgggtcaaatcccacatggattctggggattgcctcgcttgtcacttctcgaactctctgacaattcgttcaccggaagtattcctaagacgatcatcggcgcgaagaatctatcgaacctacgaatctcaaagaatcgattttcaggttcaatccccaacgaaatcggatcgcttaacggaataatcgagatttccggagcggagaatgatttctccggtgagattcctgaaagcttggtgaaattgaagcaattgagcaggcttgatctcagtaagaatcaactctccggtgagattcctagagaacttcgtggttggaagaatctaaacgagcttaatttggctaataatcatctctccggtgaaatccctaaagaagtcggaatcttacctgttctcaattaccttgacctttcaagcaatcaattctccggtgagattccgttggagttacagaatctgaagctaaacgttttaaacctttcgtataatcacctctccggtaaaatccctcctctctacgctaataaaatctacgcacatgacttcatcggaaatcccggtttatgtgttgatctcgacggcctttgtcggaagatcacacggtctaaaaacatcggctatgtatggattcttttaacgattttcttactcgccggtttggttttcgttgtcgggatcgttatgttcattgccaagtgtagaaaactcagagctttgaagagttctactttagcagcgtcgaaatggagatcattccacaagcttcatttcagtgagcacgagatagctgattgtctcgatgaaaagaacgtaatcgggtttggatcttctggtaaagtctataaagttgagcttagaggtggagaagttgtagctgtgaagaaacttaacaaaagtgttaaaggaggagatgatgaatacagtagtgattcgttgaatagagatgtttttgcagcggaggttgaaacgttggggacgattaggcacaagagtattgtgcgtttgtggtgttgttgcagctctggtgattgtaagttgttggtgtatgagtacatgcctaatgggagcttagctgatgtgttgcatggtgaccgcaaaggcggtgttgtgttgggttggccagagcggttgaggattgctttggacgctgccgagggtttatcatacttgcaccatgattgtgttcctcccattgtgcaccgcgatgtgaagtcgagtaacatactgctagatagcgattatggggctaaagttgctgactttgggatcgctaaagtcggtcagatgagtggttccaaaactccagaagctatgtccgggatcgccggttcttgtggttacattgcaccaggtataaaccaaaacatatttcagctgcattttgtaacttttgatcttatattaatagttttcaattttgcagaatacgtatacacacttcgggtgaatgaaaagagcgatatctacagctttggtgtggtgcttttggaactggttacagggaagcaaccaactgattcagaacttggagataaagatatggcaaaatgggtgtgcactgcacttgacaaatgcggtttagaacccgtgatcgatcccaaactcgatctcaagttcaaagaagaaattagtaaagtcattcacattggtctactctgtacgagtcctctccctctaaacagaccttccatgagaaaagttgtgatcatgcttcaagaagtctctggtgctgttccttgtagcagtccaaacacatctaaacgatctaaaaccggtgggaaactctcgccttactacacggaagacttgaacagcgtttgaacattccaatatgggctgagaatcggtttgggccggggatagcaatttgatgttatgatgctaggtgaactgtaagaaagatatcaaaaacagaaaagtggagctttctgattaggtaattgctcttaaagctaatataaagttataatttggatattaattttaatttaacgcaatatttgcaatatttggtggttggtccacccaatagccaaccttatttaaactcgagctcgttaccagttcaattttggaaaacggatcgattctgacgagtgatgatcaatatttttttttctaatttttttttcatattcttataaagtaaaacttagtgtggtaatactaatgccattataaaaagtaaattctaaatagccaagcatagacagcatatgtcagtataatgtggttagatagatttcttgaatgacaccttgccgcggtttcgatccaccaatgaaaacaacaagctaaccacaaaattttccaacagacacagaagtgtaacatttgttcataattttttgtttagtttgataataaattaagaataggttgtataacatgtgtttagagttaacaggggagagcagaaacaaaaatcagaaaacaaagagaaaaaataaataaaggttgaggaggttccttgttaatgttatgcatgagaagtctacgtgaagaaatagaataatgactagctttttaactttccattttttttctttttttttctttttctttttatctatctaaaaaccaatattataatgttttctaacgtatatcactaatatcagtatgtgatttcagtaaaatttatgtacatacagtaatatactgatgatggagatgttaaatatgtgtaaattataagtataagtttatgtataatatctttacatacactctagggtgacattggaccttaacttctctttcttattttttgttctaccatatcacgtctgagctctcacagaccagcaacaacaccttgccccaaacttactccatctcatattcattttcaaatcctatacatttaatcagcaaattaccaagattaattgattagttataggttttattatctttactcaacattcaacattatacattggatatagagatcatcccacacaaactacgacaagacaagttatttttgttccatgcatgttattgtcaaaaaaggaaagattagctcacatatgtattccctcataagattttgtctttcatgttattttgtttgatcagtctttgtccatctctctctcacacaccatacatacatgccatgagcccaaccaaacttaaaacccaagcaatctttttttttctttccttcttggttattcatttatttattcttcaaaatatcacatatatgtatttttaagaataaactaaagtctattcaatttatatgtttttttcttcaaaaaactgtatatgtacatgcacacttgtaaaaaaagcgaagaaaaatagttccaataatttatcaaactagtacatgttacaatgtaaaactaattaaggtttgaaaatttcatagttctttagactttactttcaagttgtaggtgggcatctccctctcgttgttacttaacatgtatgtttctacatacttgttaaacaaacctaagtctttaaataattatttctcactatacagtatatagaacatttgtacacattataaaaatgaggtttaaataatatttcttctaggattatctcatctctctctttcatggatagtacagagttaaaatcaagtgcaaaaaggggcaattatctcagcttaaaaaagtgatgaacaagaatttaattccttcctctttctcaagataacctcaaagagatcttcttatgaaacatatgctttagctatctttaaccctttttcccttctctctttctatttctccctcatacctttgtttattctgatgaagttgtgagcactgaaagaaaagaagagaggagaagagagatatgcacaagaagaattaaacttagggacacaaaacaacatgacttggtgcaatgaccgtagcgatgttcagaccgttgaaagaatcattccctccccgggggcggctgagtcccccgtagcctcacttccggtctcttgtcacaaaacttgcccttcttgtggccataacttcaagtttcacgaacaggttcttgtttctctttctacctatatcaagtttaaactttagatgatattggatatttgaatataatatattaatatgtaatgtaggctgggatccatgacttgccgggacttcctgctggagtaaaatttgatccgacggatcaagaggtcttggagcatcttgaaggcaaggtaagagatgacgcaaaaaagcttcatcctctcattgatgagtttatccgtaccatcgatggtgaaaacggcatttgttatacccatcctgaaaaattgccaggtgattctatgttgcatgttcaatcatcaattaatcggttacaaattgagactatagttacaaattttccgtcttcaaatgatcttctagttatgcttattgaaaactacataaatacgttgaaaaaacaatttaatcatattttaatacgatggaaattgtcatatagaaaaagaaaatgtagctaatccaatttcttaattaaattaagtttgatgaatgctaattagtcgttgaatacatatataggagtgaacaaggacgggacggtgcgtcatttcttccaccgaccgtcgaaggcatacacgacgggaacaagaaagcgacgtaaagtccacactgattctgacgtcggtggagagacacggtggcacaagacaggaaaaacacggccagttcttgctggaggaagagtgagaggctacaagaaaatcctagtgctctacacaaactacggcaaacaaaaaaaacccgagaagactaattgggtaatgcatcaatatcatcttggcactagcgaggaagagaaagaaggtgagctcgtcgtctccaaagtcttttaccagactcaaccacgtcaatgcggtggctccgttgctgctgcagccaccgctaaggaccgaccttacctccacggcctcggtggaggtggtggccgccaccttcattaccatcttcatcataacaacggtaacggtaagagcaacggcagtgggggaaccgccggagccggtgagtattatcacaatattccggctattatctcgttcaatcagaccgggatacagaaccacttggttcatgactctcaaccttttatcccttaaaaacaaaatgattttatatcaacgatcctaaaataaaacaaacggtatataatctaagcattatctttgatatacacatacatatatacgttgaaaataatttaaaatttacagtgcattcttgtattcgtaacttgttttttgtttctcttaattcttttttccttttgattttacggctttgtacaatttaaattccttggactgagactgaccatgaaaaatatgtacaaagatctccattggctattgactattgttacatgaattcattttgatatcttgtcggctgagatttatggactctgtagcacgttgtctacataagcgtaaaaactaaaacagataggaaaatgttgccaacatatagatatactatcaatatttaccaattaatacacatcttcatgatcaattttatacaaaaggtgtatcgggacactgacactcgtataagcaataaccatgcaaatgcctatggtaaatccaaatgcaagtgtttttctcccccaaacgacaagtttattacaattaactcattcagcaagacagtatcttctttttcaactttcaccttgagatagactgatcccaagaattttaaaagtagtatttagtagtacaaatcaagcttttgttccaacggattctaggaacttaaaagacgaaatgacccacatgcagttttacttaagaaacctctctagttctttgcatcaacatccaaattcatcccttgtaggttaagcaaaagatcgtctgagctcaagtaaaccttgttcgccgagtttgctatggtctgtgcaatctctcttgcagcctcgatcttcctgagcgtgataaacgcttggttgtttgcaattgcttgaccaatgagctgagcactcttggcttctccctacacaagccatgtgaactttcgtcacacaacaatttcgctctcagagtttagattacaagtggaaatgtagagaatctctttacctgggcgcggataacagcacttctcttgtcttgttcggccttctcaacaatgaacttagcccgctcagcctcttgagccgccacctgctttgcttcaatggcagctgtgaactccttcccgaatgtcaggtttgtgatggacacatcgtcaagcgcaacattgaagtttgctgctcgttcagtcagaatcttcctgatctccctactgaccgcctgagagaagcccggaataaatctttaagaacttcacttactaagaaagagaaaaaagatgatcatatattcacagtcatttgtatacctctctctgagtaataagctggcttgcattgtactgagcaaccacagctttcaaagtctcgttgattatagaaggtagaactctctcgctgtagttctcaccaaggcttctgtagatttcaggtaactggtctgccatgggacgtgtgagaaccctaagcccaattttcacctgaaagttttaaaaccacaaaaaacttaagagcttatgatgttgaagcgaacgacttcacattcactaaattcacaaaacaaaatgactgaaaatgggaggagtagaagcagagtaccatctgaagatcacggcttccggatgtactctcaacaaggtaaggtcgagcacgaacgtcatagatgaccggcctttcaaaccaaggaatcataaggtgtgtaccctcagggtaaacctgcgtaataacaaggttacaagctacatacttgtgaattaagaagactgtttttacgctcaacgagaacaacaaaatttcatgactaatcagtctcagggattaatgaacaacatatgagactttaactaacaaatcaacctggaaaatttcatccaaatctcacaaacagcaaaaaaactcattgggaaaatacatttactgaaaatccaaaaagacccaatttgaagaaacactgactaaccttatctttaataccgactaaacgattgaacatgatggctcgatgtcctccttcaacattgtagagactgtgcgtagcaccatagagaccaagcccaccaataatcccaaccttaagcaacgtcgaaatggcaccaccacctggtatctttggaactttgacgttgttcatctctttttctgaaacaatcccaatacatgattaatcaaaacccatgtgtggtggaaaaactacacaaacatacactcaaaatccagactcacatctactcaattatgcaacttcatcatgaaaacatcaaaaacagtcaaagtaacaaaatcaagtcagattcagcacacaaagccagtaaagatagaaaatttaacgaacgctcatgctaagctgcgcaaaatacttcctaatcaaaacagtaacaacgagtaattagcaaaatccgagcagaaaactctcacccacctccgaaattcacgtcttcactaaaattttcgaaaggaatcgatcaataccaacccattacacaaaatacataatcaaaatggcgagaatcgtacctggaaactttgcttcaagtcgcagagagaggaaaaggaagatcgtggagaaaggggtttagggtttaagctcagacttctattggagtaaatgggacggtgtcacattttccgttttggaaatgaactttgggctcacgttatgggctattagatatttgatgggctttctagtaaatacaatataagttattgggcttagtttaaataagcccatgttggaaatatttgacacatgtcttggctactagtgctaaacatgcaaccgaacagttgtcgagacaagtcgcagcatatacaatggatcaaacacgcctagtgtcgccgcgtctcgctcatgtgtcaccttgtttcctcgtttttttttaatttttcataagttcttttgttttatcttcaatacaaatttttggctgtatcttgcaaactcttcgatcatatcgccaatatacgtgaacactggtgatctaatttgttgtgttaattgttaaatttagattctattctccggtttaaaagtgaattatatgtatcatggttaaaacattgtaagtaagatgataataaaatgataaatttagttgatggataacgtgaagcaaaaaatgagatagatacatttgattttgtcgtattttgacatatgcggagagtgagctacgcgcatgaagatcaagagacacttgctcgagctcacagagtgacgtgtaaaaagcttagactgaagtccccatgcaaacctaatcctacgtggctcaaaccacgagctcacttgacaatatataaactcctcctaagtcccgttctcttcatccatctctcacaacaaacaaaaagaaaatggttaagctcagcaatctcctcgttgcaaccttcggggttctcctcgtccttaacggctgccttgcgaggcagtcacttggggttcctcctcagctacagaacgagtgtaacctcgacaacctagatgttctccaagccaccgaaactatcaagagtgaagccggtcagatcgagtactgggaccacaaccaccctcagctccgatgtgttggtgtttccgttgctcgttatgtaattgaacaaggcggtctttacttgcccaccttcttcacttccccaaaaatttcctacgtcgttcaaggttcatacatgataattacccttccaataaaattaatgtatatatcatgtctaattaatgaagatataatcgattcaccatatgataactcttttttttcctctctacctaaaattaatttacaggaacgggtatcagcggaagagtggtccctggatgtgccgagaccttcatggactcgcagccgatgcaaggacaacaacaaggccaaccatggcaaggacgacagggacaacaaggccaaccatgggaaggacagggacaacagggacaacaaggaagacaaggccaaccatgggaaggacagggacaacagggacaacaaggacgacagggacaacaaggccaaccatgggaaggacagggacagcagggacaacaagggttccgtgacatgcaccagaaggtggaacatgtgagacgcggagacgtctttgccaacactccaggctctgcccactggatctacaactcaggagaacagccacttgtcatcatcgctcttctcgacatcgccaactaccaaaaccaactcgaccgcaaccctagagtaatctcatactatatacaaagacgcacatccgctattagaagatctaccatatcagtttaactaattcatttatgtattgcatttgttgattctttgctataggtgttccatttggccggaaacaaccagcagggaggctttggcggttcacagcaacaacaagaacagaaaaacttgtggagcgggttcgacgcacaggtcatagctcaagcattgaaaattgacgttcagttggctcagcagcttcagaaccaacaagacagcagaggaaacatcgttcgtgttaagggacctttccaggtcgtgaggccacctctaagacagccctacgagagcgaggagtggagacacccacgtagcccacagggcaacggccttgaggagactatctgcagcatgaggtcccacgagaacattgacgaccctgctcgtgctgacgtgtacaagcccagcctaggtcgcgtgaccagcgtcaacagctataccttgcccatcttggagtatgtcaggctcagtgccactcgtggcgttctccagggtgtaagtacatttttcttaataaattaaatatagatattaacatttttaccaaaaagaaaaattagtcatatcctaaattatttaagaacgtatacaaatgttttaaaaatgaatttgatagatatttattccttttttttttctttagcaaaacatattaaaattggaagttctatatgacggatgacgtgttcacatgttttgtcaaatgttacagaatgcgatggtgcttcctaaatacaacatgaacgctaacgagatcttgtactgcactggaggacaaggaaggatccaagtggtcaacgacaacggacagaacgtgttggaccaacaggtgcagaagggacagctcgtggtcatcccacaagggttcgcatacgttgtccagtcccacggaaacaagttcgagtggatctctttcaaaactaatgaaaacgcaatgatcagcactttggcgggtagaacctcgctcttgagggcattgccattggaggtcatatcaaatggtttccagatctctcccgaggaagctaggaagatcaagttcaacacacttgagaccactttgacccgcgctgccggtaggcaacaacaacagttgatcgaggagattgtcgaggcttaaatcaaaacgtttttctttttcttaataaagtatggtcagtttgtaatcacgtccctttacctttaacgtacgtgtaaaatatgtgtctgcggcacctcacttgtaataacactttcttctcataaataaaagggaagtttcgagttacatactataatatagcgccagttttttcgtctattccacaaaacataagtttgtgtccatctactgtagcttgagcttcgtatatatacttggtctttattcttttttttttcaaaatacggctttctgctttctgtgggcctaaacggaggcccaaacgaattaaagttccgtcacttggaaacgttatcctagattactcttgcggggaaaagtgtagattagttccaatttttgaagtgaaaaattgtgttggattctatgtcgtaacaagaaatagcatggcctccaaagattattctctctttctttaggctttagcttctaaagctaagctacggaaaaactgtatcattcttctcttttttttggcttatgatccatataagagagcttggaagagctgcttttcatctcctgatcactagctcatacagtttttgtaatttattaacgaaactatataaaaaaagggaagccgaaaaaacaaaacaaaaaacaaccttcatcggctgctcaaatgccaatcatcccaattggtctccattattgttttctcgttactactcctccatctttgatttaataattttttgaaaaaagttttactatatgaatgatattctctgttagggaaatataaaaattgtaagcaaatgattctatcgagctataaaagaaaatataatatgcaaaggaaagatgataatctaaaatattatttacaacaaagaaaactaattgtattcatagtaatgggttttcatataattttaaaatgagaataaatcctaaaaacacgctaaatataacaacatacatcgtcctaaaaacctagaatcacacaaaccctatacccaaatgccacacaacttacatgtttgataatgtgataaatctatagataaaatgtttgtataattcacgaatcaacaaattggcgaaccccttgaattatgttcattggaaagcgaggatattttcggtctcaaaactcaatccaccacattccatgtgaagatcagagaccataccaccatccgatgatgatcccatacatgtcttgtcgtgatccaaactcgtcatgtctagtgatgacaacaaaatcttctcataattctgatgatgatcaccactgatgttgacactgttgttattgtcgacgtaaagcaaatttagcaaggactcgtgatcagggccatgactcgaaggtgatgacagcgaaccgatcatcatctgctcccaaccacatgctatggtttgatgatgacaatggtgatgataggggtggccggtggtccttgaaggctgcttcattagctgctcccactgatcacaaacttggattttcatcttctcatgttgatgattatgaggaggggatgatagcaaaggtggcaactgattgttgtaattaagatccggagcgtcattaacttcaagcctttgcgtctgattatcattgttataataattattgtcttgtagcgatgagtctctgcctttgttgaacactctgcacaagacccagtcttcctgtgtccacataccgacagaaaacgagaggacatcgttaaaaaataatcaaataaacgtatgtatataaaaatgcatgaaatgttacgttacgtgcggtctcgtgcatgcaaatgaccaaacacgcattaaagccacttttgtctctttcttcaatttttattttgtttttttgttttatctgcatatattcgtcattccttcttttaacttgctgtcatctcatcatgctcacccatgcatacatatatacgttaatacgtacatatatacatacactaatgcttagatacttgactccaaaaataactaactatccggagagtaaacatatgtatagaatctagattggacgtcagaaataaccaaaactagtgtaattaagagatgttgattattaatctcttcatctgacaattcgttttgaatttaagtgtatgattctttacatagtagttaagtgactaagtttaaaaaggtatagccgactgaaacaaacaaataaatggatgaaaaatctctattttaattgaatacacatgcatgattcctcacaatgtttgtgtatatatagtatgatcagatttcgtaagtccagactaaagttcgtgaggtgcaaaatatacagctatagactatatgatattggatggatgtatataaatatgatggattaatggattacgacaattttttgacaagttctaaataaatattgaaagtaattaaaaggatggattcatatgtttatagtgagataacttattgagattttctacctaaaaagaaagaaaaagtatgatctcatttttctttttcaaatttgttttgggataaaataccaatacgctggtaccattaatttggtatctatatctatgcatgggacatccacgaatagacacatgtcgtgagtttaggtacgttgcaagttatggttatcaagacgtaattattatgaaatgatgattactaattatggttagtagtgtcaaagagagaaggaccaattgttggggaataaccaagtaccttaggtgggatgttaggacactcaagacggaactcgtgcatgatccaagtagttttgatcccatttggtgctctgtttctgtagaacactagtgtttttctcatccctaccaattgccttgtacgtggatccatcaccgttcgatcttttcctgttgctttccagtatccgcttactgtcgctctgttcgtgcgatatccagtagcatactttcgatcacggaaactgaagaagtaccattcctttgcgtttaactttgccacatctatacacaacatacaagagatatataatcatcagtaaattcttaaaagtgtttgtcaagatacctatcagtctatcacaatactaactaaatattattttatttttaaacataaaaaatcgtattctaaatattatatataaaagcgtctagtaaatttgaattatggtgactttatggtgattttataccaatttattcaacattaattaattttttgaattgggtttataggctttcgatatagaaacagtgacatgtcaaaggttaatgtggtgatatatgacttgtgtgatgtagacaagacgaggatgtgagacattatattattagttttggcaaaaaaataattacgattttgacttcagcggaggaaattattgctctctcaaacattcctcctatcagtttcacattaatttgatccttacagaagatgatcaagaagataatgtgatgactacttacttaaaaagattcctttattttgccataattgagaagaagagtaatagaccacaattacttttttgtaaacataattatcataaaccatatccaaaatagaatattatatgtatattgcttagttaattatactatttattcatatattcgactatagtaacaacaagatcgtactggtcatgtaaataattaaaggtttcttgagtctctaaagttgcttgtgatatgaggcaaaaaaaggtcttcgtgtttacacacaaagcctacttttttgtttagttaatcttttagtatacatttatattaatgttcattaatgcaactaattaactaactttgtattttataatctgcaagttatcttatttaacaaagtccccaaaagtcaaaattacgaagacaacaaaaacttgaaaaagataagaaaaataaaaagatgacaacaggattctcggtccccttttaaaaaagcttccttaacttctcaaggtatatcatcaaacaaagaaccacaaacaaataatgaaaatcactagaaacatacaaagaacacacatatatatctatatatatatatatcatgttttgatatgatgtaagtgcacctataattattcattaaaatttaccatctgatttacgagtataacgacagctgtgattttgcatattttgctgcttttgtacagcctccagatctttattctataattgcaaacatattattaaaaagctagcatgtatctcaactaatcatgattcatgacactccggataatgtttacactaatattaatgcaattatgatttatgatcataattaatgaatcagtctaaaatctagcatttatgtgaactcatcacccgtttcacaattaaaagatatttgatctttcattcattttctagaatcacgaacaagaagattcggtttgtaagtataagcatatcataaatctgtaaatatgcaaatgcgtagatatgtattaagttgacaaacataattagacacataagtaaacatcatctaattgtaataatactaaaaagtttataggttaagatttacaataacaattaacagacgcggatgataatatctgatttcaagaattagttttcttctttatgttcaattaatttcaggaatattgttttccaatggaaagtttcaagaatctttacgaaagcaatttgaaacccaagaaaagccaggagtgaaaagatagttaaacaaattcatataacctatgactatatatcagtttgaatccaaaaaatatagaattaaatatcagaaatagtagagatatatgttaccaggaagctcccatggctcacagatatgcaagtcaatctccacaagatcagtagaacccttcaaagcttcatcaacatcatcatcatcatcatcaacatcaccatgatcagatttggccctaatcttgttgcaaagataatgacaaaccaactcttcatcacttggatgaaatcgaaaccccggtggcaatttggacccaatatctttcaaacccattacgtgaagaaatctttagctttatatatgtctgtgttaatgtacgaaaatatatatttaagagagtaatatcaacaaggcgtgtaaggttcaaagaaaagtttattagcaaaggaggaagagaaagataaagagggagagggagagggagagggagatcggtgtgtgtagatacatatataggtttaattatgtatatatttatagttagtgggaaattagcttatatgatatatggaaatacaataatataaatcatgcatgtagctaaggatgtaagatggcaagttagagtttcttacaatattgtaagattaattgggtccatggttgtgtaatatatgtagttagttatggtgggaagtttcaagaaaaaccaaagttacaagaaatcttagttgtgaggtgtctcatgggacactattatcaaatattctcttttggtttcattgttatccacttagggaaaacaaaccaaacttttcccttctttttcttcttgttcgaataaccgtttcatttagatactattttttttttgtgaatagtaggtaaattatgaatgtctacgatcgctagtctagattagtccgtattttcttttggtatctcaaaattaataagaaagtcaatcatagttttccgtttaaggattgttacctaaacaaaacttggtggtacgatttaatttggagatacaatagtactctaagattaattagtatgaagttaagcttgaatttttttttttaaatcaaaaatattagtaagaaagtcagaagaaagttaattagcatacttttatttataatacctacaataatgtgttttttttttgctgccaacaattagtattgacaattaatgggtaacatacgttaactgtgttaaatcgattattcttggccatatatttaggaaaaaaataatatggacctaatttaatatgtcaaatattttttttctgatttgatatcaaattcaaaaggggttggcaaagcatgatgtaaagttgtaaacgagcatgcaagagtatacatatataacttttactacaaggaaaaattagttacggaatttattttgtttttatcttgatttttttcaataagagaaacaatagaaaccatactttatactgaactccttttttttttttctttaattagttttctttttgaactccgtgggttggtcgatttaatactggattagtttttccttaattagagaagactagatacactgattcattttgattaataagttgacattaattcttccacaattaatttacgcctaacatgctaatgtggcatatgtgacgagaggccaattttatttaaatcgttagagacaatatacttccaatatgtaagaatgtatacgtaccaaatatcaatcaataattaccaggtcaactatatataatatgtacgattacatatataatggtatgtaactatgtatatatgtactcatggtaaccgctatccaaattgctcggttatatgacttctagatttgagagcccaaaacaaaaatcgtataatatcttctcactttctcaggattcacaaatatatttccctcagtctgtttgactctatcgccatctctactttctgaagatattagttagcacatatataaccacagactacacctagagacgatagagtaaaaccagatgagtgaggatcaatctaagcttaataacgttgtcggggtaatagctttgtctgtcaacaatgttgcacgctttgagtggtagtgatactgatactgatattttaatttctgaaaatattgtggtattctttaacagaaataataatattgtggtataaagtgagaaaatgtaaaacaattaattttacttttatatacactctatacatagttaatttttttgtgggggtctattcaaaaaaataaaagaatttatgataaacattcttaatttagactaattttaatatgagttaattacatgctcaagtggttttcaatagcattcgaatgaggacaaaaagtaacatagtccatcgatcaattttgcaactttttcaaaatagcaagctagccataagaggggagtaaactttacaaagcgatcgtaaacctataaatggggagtccatggttaaagacaggcaagacgttacctttgaattagttttataaattaagtgtttaaaatcattttttctttaatttgttagctacccttagataatatatagatattcgtaaaaaactaaaataaaatttgtttaaagaaattattttcctaattttgttaaaagttttgatagcatatgtattatgtctttatgttatattctctttgtctcatttatttataatgagatgcacacgtaagaaattttttatcacaaaaagtatttcaatttaaaatagtacaagcaatcataagagataatgcataatataaatgatcataaaatattaaatatatttgaattttaaataaaaacttatgaagtgtctaataaattgaaactaacaaaaaaaaaacttaaaacatttcataaaatgcgacagaaggaatatatataaagagatagccagatactatcatcccactaaaaaatgtcaaaaaaatcgatactatcatttttgaaactagacacaattgatgggagtaaccgagtaaggggcccattaatgatgaacatgaaaaaccgaagacactgtgaactttgaaccaaactcattttcttggtgtttcggaaaatcttggatttatttcagagcctgccacaataattgaggtgtagacaaaactcaattttgtcattatgtttcctatgtttctcgtaattattggaagctgtacacacacatcttttttgtttcttttgtcaatacatacacaataaagacaacgcgacgatcttaagtcctaacttcattctcgttaatttgtgactttatttttacaaaaaaatattggaaaaaatcaatcgctcatatgatctaatctaataaagtgtaacaggcacatgtattgtaatagtttgtgctaatacgttactgtgtcgataattctaattcaaatccgtgtattgtatattcttaataaagagtgtagatgaaatactacataattttaatggataacaatcatactattatatggatgtgataaaatagaacggcctatccttgaggtttgtgtctattcctgatggggaaatctactaatgagctggatctttaataattatgttcatggtggatcctatatcactgtctctaaaatagctatatatttatagatatgttagatgatgtcccgtatcataggcggatttaagtacatatcaaataaatttaaacaacaagtctttttttttttttttttgtaaaggatttttgtttgagacttgacaccgcagaacactagtatattttaacgtacggattttcatatatgtaatattcttctaaaataaataaaaggttatatatgcaggtaaactaataggatttcacagtgaagaattgggttctgtgatttttagatagtcttgtggatagtattaaattatggttggcgaatgtgtttcgaaatttcttgatttatatggtacatgtgttcatggtgtataataaatgcttataaactcatatggatgttttccggaataaaacagttaattccattctgtatcaacaatcgcaaatatcataagttttaagccaaaaaaactgagtagatagatatatgtggctgtaattcggttggaatatacaagatagtacaaaataccaagaatttggataattccttcgtatgtatgatgcatcggccgacctcttatgtggttcccacaatattcgatatttttcaaatgtgtgtcacaacttgttataaaaatatgaaaatgttattttcttaagtatcttaacatagatcgaccatttgttaatttatttttttcaaagagatcgacgatttgtttcctatatgcatagaagaataccaatcaaacatatatgcaacaaagtctcgcgacatgagaagcgacaaaggtgtttcatttttcgtttttttaaaccttattatcttttaaattatgataattctgatagctagtaatagtattataaaaaaaagggttagtaattcaaaatttgtttctatattttatcacatgcgctagccgctaagcataccgctaatgaaccaatattcatagttgtaactgaacatctctctcttctcctataataatctcataaattagagggagccgaatgcggcgggaaaattggtgaaccgtctctaggtttacacacgtccttccattgctcgataaattaacaattacttaagaaaatcttaataatatagattaattcagatcagatggttaattatatttcttaaccgattaatcaattaatgaattaagaagaacaaaaatcaataaataaagaataactaaattgtaaatcaaactgtgttgattaatggctagtgtcgttactatcatcaattgtaaatcatattgtaaattgcaagtgataggaaacatcaaacatgtgttttatagctgaccaaaataacatgtctcctaattgtttatgatttttggcgacatgcattgcattatgcaaatttaaaaccgggtaatgacattacaacatcacgaacatatatcacatagctacattagatcattagatgatcattttatattttactgtaagaaactaattaaattacggaaagaaaacaaaactacaaatagttggtgctgatatttgttttcttctccgatggaatagctacctaacattagggcaaaccaaaaaatgagttttttcttgtaaaatttcttccgttcaacatccgattatcatatcatgttttcttctataattgacatgtaacattctgaagagtaaagctatatagccaaagttatacgaccacaacttagaattatagtcgtggtatcgataagaacctatagtgtaagacccgttagctaaaaaacaaggatcataattactaaactctcaattttcttaggtcagtgaaaaaatgagagaaaaggtttctcgacttattgaccatcaaatcttgcaatagatttggagatactaaactctcaatttttcaggcttgcttttggatcgtaggttggatactacaagtaattttgtttgagtattttattgaataattatattttgttatatagatagtcgtcatatcaaatattttagtctatttagcataaatatccatactttaatttcttaaaatattatgcatatatattgtattgatagtttaattagaagaattctcatattaattaacatcaaataattcatatataggcccctaagatagcaaataacattttatgtatagaaaattatacatatatggagacgtatagaaagtatatgtatatttgtagatatggagaaaccaagcccacaaatcatatgtacaaatataaacacacataggtatatcaatatgagagtgatgggaatgagtaaaaatcgaggggaggagtttattgccaagtaaggaagattatgtgtgtttgattggagaaagagtgacggatttaacattctttgtcgtgatctaattattcgtctttcgtaattcttagcagccttcttcttcataaatattatatatatatttcagactccatatttttgttgtcttttttagtattaattattgtatgaaattttggattatctccattaataatctcaacttacaaaaaatattgttaaattttgtcttctagtctttctacactaaaactgcagatcacatgataaagatataacgtttttttgtgtattataaaacattattgatatctttgtacgattctgaataaacctgttatgtgtgatacagttaattgattacgttatataacttgtattcattatagttatttaattaattgtttggattttgagatcccaagggttacatctaactagctagtaggcaaatcattgtgccaatcatttaaaaaaaatactgaatgaacaagaattgaaagaaaaaagagaaggatgaacaagacatggttatgtcataaacgattgattaaaaaataaaaataaataatattcaacatggtaaattgaaaatgctcctatcagaaagtacataagtataaaggaaaagagaaacaatattataacatattcccattatcagaatcaaatagtaaatataggctctaaataaatgcacatggcatgcctttactatttctgcagaccaaatcctaatatcattatgattcattttatacaccatttgttgatattgactcttgttagactttttatgtatttgatttctatcattctatgtatattctttttgtagcctctaacaaaatctattgaatatatattttatttttttgttaaaacaatctattgaatatttcgccattatatttactgattcccatattttcattaaatcatttacaaaattttctccttggtatataccagaaaatgtatgaggcatggtgcaagataagctattgattcatatccattcgtacatgtctgatatgatcatattcttaaacatagagacatttttatgcagtatgagatctccgcagttatgagatatgacacaaaagatacagttggattcatatccaccaagcaataatattaatatagtaatataactatattttcaatcacgtgaacatctttctatatgagttaagagttaagaccctagctagtttttatcaaatatatatggggagagagccggtaaaattcgcattcgttcaatcttaggcatatagatacgtaaaggccattaggattgagggccaaaaaatgaatttatacgaatacaaaattcaccgacgaagatctgatttcttattgtaaaagccaattactggaatagacgatagatatacaataattaatatatttttttgtatgtaagtgaaagaatgaaatgagatctgattctcgttggattctacattgactttatgaccatttgttattgtttgtaagtatagataatttgattttgatttaattaacagtcttttatgttccgaactccccattttctagttatatcaacatcgatcttacaggcacatattaaggaatttttttttttgtaactatctaaatggtaatagttcattgaatctaattatgtctaaaataaacattggaacatacattgtatctcaaaagcatatattgaaaactcgatcagctgtttaattatgtgattcagaagaaatagttttgattgtgataaagaactaacacttgtcacacgaatcacgatatatactggtactctatgctattttcttatatatattatatgtttttttttctggataattttaataaatgttaaagttataatcaaataagctagcggacaaaattttgcgtcctgtcttatttttgtcatatatgagaatacattcttgattggaacataagctctaatcattgttaggaaaagaacgtgatgggagtatgaatgagaagtttacaatcttattacaaaatttaaaatttaactagtaaggattttttctttttgtacaagagtatatttatagaaaatattatttctcttcttccattaatgattatcttttctatattgatctaaaaaaaatgtaagaaagaaatttctaatcttacgggattttatttattttaattttaatacgattatacatgtatttgtttacattatgtttgaaaaaatcaaataatttgcaagttttttatttaataaaaacgcaaaactaaggtttcagcattaaaacaattaaaatagcaaaccgaagattattacatccagacagctatgctaaaataggcagaaaaaatgtgactaaagcataaaacggcgaacacaaaggcgacaataaggagatgaaccggttatcgggtaacgcttgcgtcgttgattaaaaattaaataacagattaaacatgttactttaagcaatttattaagcatgtttgcagattggtcattatttgccaaaagataactataacgacgccatcgttaactgaagagggcagtaatgatgcgatgaataaaaaaactctctgcggtcgtatacgaattgattgaaatctttttattaatcgtcgtctaaaaatagttattcagaaaacaactgtttatcgtataacataccggtatataaaaccacgtgggctctatatatacgattcagcaataacaattcaagatttcaagacagtgaaaagaaaatattttatcctaaaaaaaccaatgaaaagaaaatggtacacttatgatatcaggatgtgtgagacgagtcacgagacaagccttaatctaagagtactttatgtcaatttctcatattatataaatcacaaaccaataaaatttatgaaaaataaaaagaatacagatgaaattgtataactgacatcaaaagattcggaatgatataacttagaaacgtgggaaattgttatctacaagtaataagcatctatattctcgattgtgatggcaatatatctacatcaacctcataatgcattgaaccctatacttatatatatatatatatatatatatatatttatagattctactaaacttacattttatgttgttataatttcaacaagaaaaaaatatatttacgtgcatggtattgtaacatgttaccgttctggcttaaaatatttgtaatagttttttttttctttttgtagcaagggttgtgaaaacaaaattgaatgtaaattcttaaatcacatatacaaaatgcttttgccaaagctgggacaaaaaagaacagagggaaactgggtgaataatcatataaaatttatttaacgtagtatgatatataaatttcattgtcagaataaagtgagacatcgtaaatatatgaatcaccaaatcgtatcttcttttccctcacaatgaaaagccactttttccttgttattatcgtttgctagatatacagtttcatgattaaacctaccagattaacataaaataaataataaatattccaatcatcagtgtcaaattaataaagaatttcaaatatttgatggatacgatattctcttaagacctagagtgaaatttgttacaaagtttatgatcatatataacctgaaatttgcttacccaactgatctttctgttttctaatggcttttatttttattggggccgtagaagtttgatttgaaactcttgtaaattaaacctcaagttccttttggtaatataattaatattttatcaaaaaacttattacaagaacattatgatgagcacaaaacgcatgagaaaaatggctgaaatatgataaagaagctgaaaccttactttattcgaacagttaaggtggtttgttttctccttttaattagaagttttctatatagttttcactgtatcaagataccgcaaatataataatatatgtatcaatataatcaaatagacgtgtagctagtaaattggaatgcttctacttccgacacctggataacatgtcaaaataattcacaatatgtgtttgtaatcagatttatcagagaaaagatgtgtttgtaatcagtataagttttatttcatatatttgtatatatttgcaaacacataagtagagttatttttaataataccatctttctagttccttatttcaaaactatatataacagggttttagaaactaacaagaaaatagatttaggttaagttcttgatttttattttatttttttcctaaagtattttatatctttttttcttaagcatattggtagagagagacaacagtgttgataaaagaggggcagtttgattggaggaggttgaagaagcgtgtgaccgagaactttgagcttatgattaattattttttattttatttttaattttgccgccgtaatgttagtggactcattcatagtttcctttacgataacaaaataaatattgttggtcaattttaaaatttcaggtttctcaatttagccaaataattgcacatgtattataaatatatactcttacatatgcgggactctgacactaattataataggttgtgttaaatttgtaggtcaagccaaaattaaaaaaaactatcacgttatttcatgcgttcattatatatatatatatatatatatatatactttaccatattgatcaagtacgcgaaataaattcgtgttatatgcaggcccggcttagaggcagtgctggcagtgctttagcactgggtccaccatttttttctaatttttacaaagtttttagatctaaattttttgatatttttgcaataagggtccaaaattttaaaagtttgtaactaacatcttaaattttctgaaaaaaaaaatttgagcacaaggtccaaaaataatatgagccggccctgattatatgcgacaatttttttaagtctggaatatattatattattaaagtgaaatatgtgacaattacatatcaatactttattaaaaacaaatgacaattacatatcaataattagcttatgtttgcctagtatttgcattcaactacaaaaagatgaatttcatataaatcatctaaagagggagagaacgtggatggcataagatccacgggatcaataggcctaagcatctaaaaattatagagctagccctagctataagatcataatatacacaagtcacaactactctatatataatgtgtattatttatgtatattttgtgtgtgtcttactcctaaggccctgatcctacaatagcttttgaaagctatagaccaaccgaagagaggtaaaggagaagaagaaatctaatcaatttaaaaagaatcaagaaaagaaaaaagagagagacatgacttctaaaaatcttattattcgctttaagaacttcaacctcatgggaccactaaagaatcttttgttgttttaaagttttttttttttttttttcactttttaacttttcttaattgagaaatctactcaatctatcggggtcgggttacttttatcaatatgtacaatgattttctttctgtgtttgtgtccaaccaagccttattacaatcaatggtaacggacctttttttctatgatgtccctaaccatatttagaatcgtgtcaataagatttaaaatctccaaataagaaaatatgcatttaagattctaaatgagtcaaatacaaatacaaaagacctaagattctgaactcttgttaaccaaaacaaaaaaatgcagtaacaaaatatatagtaaagtataaaaatacataattaatttgcttaccaccaaccaacagaatgacaaacgaatcttaagcacacaaggaaacacaataaactaatgagaacaataactttattacatgattatgacataaccgtgtcctgatccaactgaaatccctctgaaaaaataattacttttaagttataaataaactggcgactaaatgttactactaaacgacgatcaaggagaaaaaatgagtcaaagatcttaaaaattaagcatattccttagttgaaactaaataaagataccattgcgaaaagtttgtccgcaaaaaataaaaataatgatgagtaatttacaagcttcattcattgatatgaaaaatctcaatctagacgtttcgggtttattgactacgtggactcactagacttgccattgacgcttcttcatgacttcatcactgaccaatagcaatagccaatagcctttctctctcgacacattcatgtgtgcagcagcagaaagaaatatcctctacatattccacgttgcaaagtgggcctaagacaggtggatcaggcccaatgactccaacgtcgcttctatgataaagacaagacaacatatccataagcgtgaattattagcattaatgattggtataaatgtcatagataataattctcaaaagctactctctagtctgtttatataaactgtttttgttttaggaccttgattgttacccgtgtagaccaatatgtccttgatagagactcccaagaacgcataccaactagtcttgcgagttgcgtgtttctaaatgcacaaagcctcaaccacaactagtccgagcacaatttggtgtgcaacccacaaagaaatgtttgggccgattagttgaaacagttgggccgggcctattaatagaagtgttaggcccatttattattctctttctctgtactgggtcaacttttctttcgccaaagaaatatcaatcaattcgtcacctttttgatttggggaatgtgacaaagcaatctgggttgtctgattatttccaatgacttccttctctgtctgattcgtttgtttcggcgattcaactcttcttcaacgccctgagagtcacgcacgagaattggattgatggtttttcacacgcaggagaggcgattcgttgtcttcttcttgtcccgttgacctgtttcgatctcagatggtgattatgcagcagctgattctaaattagggcatttaaatccgccttccaggtgaatttttgaaaagtaattaaagggtgttcttgaatggacttgaaaatggataatgttattgggggaaagtttaaacttggtcggaagatcggtggtggctcttttggagaactttttcttggtaaagattgcttcttttaaatatatatttttattctgtgatctgttcttattagtatgtattcaattttgtgtgatttaactttttcccctatgtgaattgaatctgttcttgttgaattatattttcagccgtaagtttgcaaaccggagaggaagcagctgttaagctggtattattcgcatcttgtcctctttctcatcattttgtgacaataacatgtgatttaagattgaggtgacgagtcaaaattgaatttttacttgtaatagctattatgaaataggtatttcattgttttggcttcattcttttttgagtaaaacatgcgacaatgagtccattgcatcaattagttgatgtatcttccatagcttcttaattatcgaaaacttaatatgtctaacgttctgttaaactttgaaggagcctgcgaaaactaagcatccccaacttcattatgagtcgaagatatacatgcttctacaaggaggaagtaagtttacaactctgagatgagttttctggtcaaaatctgtagagatatcgttgtgctaattttatgaaaaaacattctctagctgtgaaacatagcatttgaaccctgctcatctgatatcgcattcgggatttaatttgttttctgtggtgaaggtggcatccccagccttaagtggtttggggttcagggagactacaatgcgatggtcattgatctgcttgggccgagtttggaagacttgttcaactactgcaataggaggcttactttgaaggcagttttgatgcttgcagatcaactggtgagtattttcaattgttgctttcactttttcaaggcagaagaaatgattttacaagtttggagttccacctaaaatgttgttgatcattgtagattagcagagttgaatatatgcattcaagggggtttcttcaccgtgacatcaaacctgacaatttcttgatgggacttggtcgcaaagcaaaccaggtgcttgtttttatgttctttctgttggtagattgtttcccacaaataacgttatgttagattccatcctcttctttttagtttactgttggtatggtactatggttatgaacatgagttcttgcttttttttttctttccatcgaatatttgttcatttggatgtctaatagtgtaagaaacagaatttcttagctgacctggatactaaattatgttctgaataatgtgtatctaggtgtatatcattgattttgggcttgcaaagaagtatagggatctccaaacacataggcatatcccctataggtgatttatggtgctttcatgttcctgtttatctacttcttttattttgttttaacttaaattcttacagatactcatgttgttttctttgcagagaaaacaagaaccttacgggcacagctcggtatgctagtgtcaacactcacctaggagttggtaagcaatacatagaaccactcgagaatttgctccaaagtcatatatacaattcctaaaatgtgtggatgtttgcatatctgttggcagagcaaagtaggagggatgatctggagtctcttggttacgtactcatgtatttcctgagaggaaggtttgtgcatacagatccgtttttgtctgactaaatctttggacatgtttgttctggtctaacttttctggattttcgggttcagcttaccgtggcagggactaaaagctggcacaaagaagcaaaagtatgacagaattagcgagaagaaagtatcaactcctatagaggtaaagacataatatggcttagataccattgactgaagttagatcagccatctcattgtcacataaatgaagggttaattgttctaccatactttaacaggtcttgtgcaagtcatatccacccgaattcgtatcatactttcaatactgcagatctctgcgattcgaagacaaaccagactactcatatctaaagagacttttccgagacttgtttatccgtgaaggtttgcatttgctctgttttggttattttttccctaagggacttcacagtacagttctgtgttgtgacattttgttataccaatgctttttttttatgcctggaattgctttttatctttgattgccctcactagttactgtcaaattttctagatattgaaatcttccttgatatttctataaatgtttcactcttttaacgaatggattcgcggtatcaggttatcagtttgattatgtattcgactggactgcattgaaacaccctcagagtagtgccaggtcccattccagtacacatgaaagggtgagtacacatgtctgtagatttttctatcgagtatgactatacatactcactttcgtttcgtattgatctcttcttcagcatcgtaccggtaaaccagggatgggtgcgggaccgtctgctgaaaaacctgaaaggatttcaggtaacccttgacttttttctacagttaagaatcatataactcttcttcgctaaacggtggtcggttctgattttgtgatcctgtctatgtcttacagtagggaacatccgcgataaattctcaggtgcggtcgaagcatttgcgagaaggaacgttagaggacccagtccccatcaaaaccataccagacatcgaactcttgacgaaattccttcaatgaaacctgctgtggtaaaaaataatatcatcatcttatatatatcaaaattttgatatattgttattacattatagaacgtgcttagtgattttaacacttttcaagaaatcaatcttgctcgttcttgatatatcaatttatttgatattgtcagaatatggtatctgagaaaggaagaaacacttccagatacggcagtgcttcgaggagagcagtagcctcaggaagtagaccaagctcatcaggtgaacaaagggagagccgggactcgagccgcgtagcctcaagcggtggcggtgtccgaccatcagtcttccaaagaacccaagcagcagctgctgtgagtggatacgagtcaaagacagcatctgcctttaaccgcgaccgagtagccgcttcaagaacagcacgagacgaggctctcagaagcttcgagcttctttcgatccgcaaatgaagccttcatcaattggctctttgctgtaaattggattcttctttacatatgttgtttggtcctttgtttccacgaaactcccaatttttcatgtattatcaaattctctggattttgtatcaatttttacacactttattgtaatcatgacaatttgttgagtttaattcaatgttacagttttaattttgtgttacatatgaatttatacctttaaattcgacgacgtcgtttccaagtgtataacgtgtacgccaactatcgtcgtttgaaaccgtcaagtttaacggcagcctccgtcggtgaccttgtcgtgacgcagggccttttcctcgctccaacatttaaattctctgaatttcgattgatcaatacggagtacgaagcacgaagatcgatttagcattctagttcatgatgttgaatccgacaaggtacaaacttgattgcttaaaggttatgtttttgccggaactgggacaatgtttagattgtattctcataagtctggtacttcctttaaaattggagtttttgtttgttggagaaacttgacttttagctacataagatttttaagggtcaattttgattgttgttagttgttttgatgaatttgtacagggatgatagtctataataggtttgctctgaatctggattgacccagagaaaaaaaagtgaagctttgtatgatttgttgtggatttatgtggaaatccggaggtgaagatttgcaaggtttctatccagttagagaagaatgtgtagcagatgttcccaggactcgatttaaatcaagggtttgtctttttcttagaccatctatgttcttgatcaatcaaatttgtttcaaagtttgagtatttcattttgggatatgatcaggctggtaaaactcttagtgctagaaaatggcacgctgcgtttactggagatggacatttggatatggaaagagttcttcgccgtatacagcgaggggtaagtctatcttggtgtgataactcatcttttggtctatggctttaatgctcactaggctacattttcagggaattcatccctcaatcaaaggagaggtttgggagtttttgttaggagcttacgatccagacagcacttttgaagaacggaacaagttgaggaatcacagaaggtacttactgaatgcttactggtgtattgtttctgctcttgacattgcacttcgtagctaattttgctgtacttattatctaagggagcagtattatgcttggaaagaagaatgtaagaatatggttcctcttgttggtagcggaaagtttgtcacgatggcagttgttgcggaagatgggcagccattagaagaatcctcagtagacaatcaagaatgggttgtgaaaaccgctataacagacaagcgtgtgctccagtggatgcttgtgttgagtcaaatcggtattgttaactactcaataagtttatcttctctagcattctgtacaagtgtcagaattcagaaatatgttaagtgctcttaaagaactgctaataagataacaattttgttgcaggtctcgatgttgttagaacggatcggtatctctgcttttatgagagtgaaagtaatcaagcaagactatgggatattctttccatctatacatggttaaatcctgatattggctatgttcagggtaagtccaccttggtcttaatactgaatcttcaatacaggagaacatgtaaaagaataggaattaatcatccattttgtataggaatgaacgacatatgttcccccatgataatcctacttgaagatgaagccgacgctttctggtgctttgagcgtgcaatgcgaagactagtaaagatctaaagcttctgtcttgttctgtttcatctctgggtttgtttttgtttttcatgggtttttttttcttgaatttcagagagaaaatttcaggacaacagcaacatcaatgggcgtccagactcagctgggtatgctctcacaggtcattaaaaccgttgatcctcggctccatcaacatcttggtactccttccttttgcctttccattttgagctttgtttttttctcttgcacttctcatggttagttaagacgttatactctttttcccacaacagaggatctcgacggtggagagtatctgtttgctatacgaatgttgatggtattgttcagaagagagttttccttccttgatgctttgtacctttgggaggtaacaagattctgtttatgtttctactttggttacaataactgtccgcatttcttgatgtcataagctgatgatggggatgtgaatttgattttcattcacctgagagaacccaattcatgttcttttagggtttagagtgttgtcttgatttgagctgataataagactgtgagatagaattttgtttcagctgatgtgggctatggaatacaatccaaacaagtttgcatcatacgaagaaccacagaacatgaacaactcctcaggacaggatccgaggttacttaagcagtatggaaaatttgagagaaaatatataaagagtggccagaacgagcaacacaacacgcttgctgtttttgttgtggctagtgttcttgaaacaaagaacaaacgtctcttgaaggaagctaaaggcctagatgacgttgttcaggtctctctctatatgccaaaaaaaaacttttaagaaatttcactcttctctggttttatggcgatttagttgtgtttattttctttggttggtttgcagatattgggaggtattgcaggtaatttggacgcgagaaaagcgtgtaaagaagcgttgaagattcatgaaaaattcctgaaaaaggtgactactattttctgatcatcttcttcttcatcttctactacttgtccttactgatatgttaaatgttcttgcaggctaatagtaagcattaaggaatgacattgcctgacctttaactatccgattttgttagaccgatgtctatatcgatcttcgcatgaaattgggtcgacagccgaggtcgatagttctaataaagattgggggaggtatcgatgagaatgctctgattattttgttctttcatttctgtaatctttctgttcctatgtatttgagtttcactgttgtatcttataaattcgtttgttgataatgtgtgcaaagaatttatacctgcgtgccgtttctcgaaattcatgatgttttcataagccccatctcaaactactctattgcttttggtgtcttttgatcatatttcaaagataattttttcaaagatatgtaactgtaataaaataatctaagcacgaaggtagagaatggtcgaagaaaactatgataagtaaacaatcttttgaattgatcaaaagatgctttcatgagcaatttatttcaaacaaaatatgaattagtaatacaaaacttaacgacaaaaagaaagctatacaaaacataaaagcatccaaaaatttagtatcctaaaaataggcttgtaaaacaaatctaaatagaaaatatttttacaaaaccaatctcctcccttctttttttttctttgtttgtaagttattcgtttgatggcaatcttttctctatactacttttccttttatttttcagaattcttcaaaaattctaaaccattgagttaacgaaaaaatctaaacaatctttgtttaccccctcatttctctattgtcattttgctatcatcacacctctttcaagaacattttctttgtttttttccttaatttcttcatctagtgaaaccctttttcttttgttatcagggatcttgcatatcttttaagatggtgttgcaatagtttcttctcttttcgattttttatcttctatatatttcttcacatattcatacaaaatttcggatacaagaacatgcatgatcatgaaactttcaagatgaacattattttctcaagaaaactatggattcttgagctaaatatatgattctcttattcatttttcattatcccttaaattttgaagagttttatggtcacaaatttttgtaaatataaagatcatttttgtagattttaaaactggtttattaggctaggaaatttggatatttttaatatatgcacgttgttttttcgttcctttcatcggtcattcgttttgtacaaataaaacaaaactaggatacaagaatttggtttccacaaagagaagagatatatgcaacttggaatgtcaagtaccaagatgaaaagtctcttgaaaggcctccgatacatatctcaagtttttggtgagtttttatttattcttctctccttcttttccaattcaatattttagaactcgatgatgactataatatgcttgaatgtgaaaactatcaaactatgaaacaaacaaaacactttcaagctagcatgttgttattcaagaaaacgccacatattttatggagttatattaaaaatagtaacataaacactacaaattttatggatactagatagaaccaaacattgtagttgtattgcttctatgggttttagatgaatgtacatgaaaaggttatgatttatgtcaatttttgatatgaagcaatagaaggtgaaaaggaagaagagatgcaaataggaaatccaacggacgtaaagcatgttgcccacattggttgggatggaccgtctgataatgccactgcacctagctgggtactactctgttcctgtcctaccgttcatttcaaacatatctacatatattaaaaattaacgttatgttataaaacctttggaagatgaacgatttcaagagttctcctgtaatggaatcaattcaaggattaggagaagacgattcctcagtgaaatgtcaatcagagtttggtggtcggactagagatttaccaaaactaccaaaatccacgagaaaatcatcgtctgagaaaggttctccgaccaaagaaagatcagacaagaccaaacgtcggacttcaaacaaaggcacatcatcgtctaggagaaccaaagacgaagattctacctcatcgtctaggagaacaactaaagatgaagattcttctttgtctcaacatagtgctggattaccagaggttccaaagaagtcaaagagaaagaaatctaaagaagctggtaatggagggtcttcgagatcatcacgaatatcagaagctgattatatgtctgatactggttccgatagatctatgcctcaatttgaagacgacagaaatgggttttgattttcattttcgttaaagaaaacaagagactttaaagttttgtaatagtaaagaaatgttgtagaaacttttgaacatagtctgaagtaatttcattaccagaagaaactaataattacaaccaaaaattaaaactttaccattctctaatcaaaaaggtcaaaagcataataaatgttaaaacttttcctctaatctgttctgtgttcttcttcttcctcactgtgttattgaaatgtaaagagccaataaagtcgccgggaagtaaatcaaaggtaaaacctttctcgccgatgaatatagagctcttccggcgagatgaggatcggaattc

SEQ ID NO: 641 - DNA, 97155 bp, Arabidopsis thaliana
gaattctactaatgttaatacttaatacatgttagttggatcaaacgaagctgatttgtgtaaataagatagatttatgtataaacaaagctttgacttataatatatgaattgattgaattattgctggatttaattttaaaaagagctcaataattgttttcaataaggaacatgtcagcttacctggttacagaagcaaccaggctcattttcagtttcattgttattactgcaatattttttgttcaacatgtattatacacaactattacaaataaagtaataacttggctacatgttatgattttgttatgaatgcatcatatattatacatttataactttaagactttaatacacacataactcactcacacatactgtatatgatatatgaattattgcttctaactctatttatttagttttccttttcattcaaaataaaacacaactactcttggttttgtctcttgacaattgtattcttttatttggacgaacattattactaaatcatgtaattgattacaaaaatacatataagtaggtcaactaactactaataataatattttaatttcataacaaacactacattagccaatttgattattaatatacaattttatattcaagacctagcaatttccttttgattatcttactttctttttccagttaccaattatgaaattatatgcccaatcatataagatatatttataattatctgatgtgggattctgactcctctgattttttctttgtaatatatttatatgccactaaacttaaaatagatgtatattttgtccttcatataagcatataacagtcttaaaaataagtggaacaccttcttctttttcatgtcttattttggaacctctttcttaactttgtaacgaaggacaccacgatggaacctgggctgcttcgagtgcaggtgcagcaccgtagatgaaactttttaagtttgtatgatgtaaaaacaaaatgggaaacgattcaaagaacatgttataatgcgaaataggtagatgaggccaaagattgttgttatgtaaaaagcaagtcattgcatcatcatacttatcatgtggtccaacttatgccgattacgaatggaagttaaatttaaaataaattattaaatagaacctaacgaaactattttatattataggtgtattaggttgaatatggacctgttttagaataacgcccctttctttctagtagagttcagtcttctttggagttggtatcggatcaaattttcgtttaaaaacaataatgatgtagcttaattcaaattgtagtaaattactttcaatttaatttttgttttggttttcaattacttaggttccgtctggatttgatttcaattttcacaatatataaagataacagaaatatttaaaagcaaatattgaagagtatatgatactaattactaaacactatgaagaaatttaagacaaacttactttagtttacacaaattggattttcccttatggcctaagataggtttccattacagctgtacaaatacaacctacacctggtcacctgcctcttccatgatgatgatttctccgaccgagcgcatcaaatcgtttttcaactggcttcatgagctctcaaacattttattctctcccagaatagtttcttactcactgtctccgagttatttgaatcccatgttgactctcaaaatctttcctcataaatcaattgcacaaaaataagaatcgaacttgggcgtctgtgaaagaaacctgtgcattgctaagccttttgaagactcatctcagctcaagcttggctctggatttctgcaaagaatgacgctatccattaacatgtatacatatatcaagctgcagcaaaaggtcattgatcacatagcaaagagtagctaaaaatgatatgtatgaatcacataacaagattacacatccgggtgtaagaattatacaaaggttgggggaaatctttgaatgaaaagcacacatacactttcatgtcttgtgtgtgtaaacacaaatgcttcaaccaacgccttcttgtccacacacacttcagagaatttacatagaaaccattgcatctttcttccagccaaaggtggaggagatacaaaggtgttagtgacaccaagttctgatttctgctgtagtttcagaggtgaattaagggcacggagtcacattaacagcgcatcatctcactcaccatttcaggaaaaagctacattttctttgcatcatttctctggagacatgaatgacgaagtccaaccagttctattcccactcccatatccagaatttgaggtttcgggtccgacatttctttttgaggtacccgcaggagataatgaagtggatggcatgttcatctgcaatgggttttcagtaaaataacagtcaagggaactcatctcgaagatcaatatattgtttcattaattcatgacaattgacaaagcgatactggtaaaatcagttttcagggaaccatgaagtgttctgagagtaatactatacatgacatgctaacacaagcaacgagtttgcagaataaaacggttctttggaagaggcaaatgcagaaatacgtacattcttgtggacagggtgatcaaaccccggagtcctccctgcagcagtattattatttatctgtgggcttggaccaatggcattagccgatctgacgcgttcagaggcctcggcttcataagaaatatttggtcctcctgccaaacagagcgtcagaaaacagagatttcaaaataaacaattgcaacaacaagctattaattagagctaaccccgatgattgcttgtgtccactggcattgcacgaggattgctagacccaggaactgcctgcagtagaaatgacaatactttttgttagtaacaagaaaggtgacacagcagcaaattaagattgagaaaacattgaaaactatacctgagactgatttctagatttctgtgcttgttgatactttatgatagtccagtcaaatatatagtcgaactcatatcctgcaaaagagaacatataatagtgaggtaggtagatgatgccggtgaaccttatcagctgagtgaactatgaatgatgaagagatgtctttatccaaagtacctaccttcccgcgaaaataaatcacgaaaaagccgcttcaagaatccataatctgggcgctgatcaaatgtcagtgtatggcagtaatgaaaatatgatgcaaactccacagggtgatttttgcatagcacctgcaatgggatatcgatatatacttagtcgaatgaggattaacaaaaaaagaatcaatcacacaatagggaaacatacctcaatgggagttgatatcttcttctcacagattttatcatacttttgcttcttgtcaacagccttaagaccctgccatggaagactagaaaaggacgttcatgaaatgaggaacacaaaaaacagttaagtaaatctctaaaaacaaggaatagaaataccctgcgaaataacataatgttaactagtttctttcaaaaagacaacacaccttcctcttaggaaatacagaagcacatatcccagcgattctagatcatcccgtcgactttgctctgtgaagagaacccaaaatatgagcaaaagcgatttacttttacataaggataaagaatgccagcatttcttaccaattccaagatgtgtattgcaacttgcatatcgtgcagttcctgttaaattcttgttttccctgaatatagccgaataaaggaaataagttgtataatgattaacgtgaccgtaaaacttaaaaacagatagatcatttacaatctgtatattgaaccaaggccacaatacctgtaagggatgtggcggttggtgttggcatcccgatatcttttggcaagtccaaagtcaattagataaacctgaaaaatgagacttatcaatcataccatactctacttatggcatctgatgaagataagaagttgcagaaatatacctgatttgctttccgacctaggcccatgaggaagttatcgggtttaatatctctatgcagatatcctttcgaatgtacaaattctattcttgttagctgtaacagcgggataagaaaatcggaagcacattagataatcaatgtataagtcaacagatattataaatagcctaatgaatagttgaaagtcatgccataccatttgatcagccaacatcaagactgtctttggtgagaatttcctcccacagtagacgaaaagatcttcgagacttggaccgagcaaatccatcactaaagcattctctgttccatcaactccaaaccattttatgcgcggaattccacctgacacataacataaaaattagtattgtactgctaatgaatccctccaatgtccaacaactgagaaaagagaggaaagagaatcatacttcctccttcaagaattctatatagcttagcttcatagagaagttgaggatgctttgttttactgttctcctgcaagagaaaatgattgaattaaaaacaagtgttagcttgaagaatatattgcagctaaaaagcaccgagtttaaaaccttgctcaattttagagtaaagcaattcaaacaaaatcaattaagagacatagcagatccaaatcaaatctccagattggatggattcaattcgtctcaaggcaaattgagctgggacttacgatcttaacagctacgatctcgaaggtatcgacgtgcgtagctgcgaaaacaacaaacagaagagaagagcgtcaatttcaaataaaaaagcaaactcggaaaaccaaagggacaagaacagaggagaacacaaaacctagaaaaatctctccgaacgaaccaccgccgatcttccgtccgagcttgtacttgccgccgatgatgcgttccatggcagctccaatcagaaccgaatctggatcaagcgcaaggatagagataaggatttagggttgttgtttagaagattgaaattagaggaacttaaaaacatatattattatttttgtttgactgacatcggtggtagtgacatggacccaggcttgtttgagccgtagtagtgatccttcaaaaaaaaatttgtacacctaactactgcaccattttgggtccgccaatctttttttaccttataaacaaacacgagggtatttacgtgattttgtaatgtcacgctggcacggtggatgatttgatgatttccgtttttggggtctgcaaaatgatgaaggttcgaaaatttaatgggttggctgattttcgagtcataaactatttcgattcttagttttcactcccggatttttgggcccttaaatttccaccatcaattttcatattcctcaaaattacatcatctactttcgaattcatgattaaacatacattttcaattgaaccattcatttaaccgggattaaccacaaatccgcgtttactgtaccgcgattgtgattaacccgactaatacccagacccgttaagaaaacgacgtcgttttcattcttcttctttaactctcaaatcgatttggtagtcctcttcttttgactttcatctctgtctccatcgtcttctagattgacgtctccatcagacgctatgtcaccatcgtcttctctattttcctctccatcagaagctctgtctccatctatcccgacgtcctctccctcgattctggtggcttcgtcctcctcgactccgctatcaccactatcacttccatcgtcggcttcaatgtcactctctggaggttcgaaatcggggtcatctggatcgctttggtaaatcaatctttcctcccaccaattcttcatttctccctattcgaaacccaaatcgagacccaaaaattcgaaccgaagaagaaaaccccaaatccccttttgtctttctctctcaagaaccctaatttcacagtgtcgagattaaagaagaacgactaaatcgatttgagagttaaagaagaagaatgaaaacgacgtcgttttctttctctttttgatgagttaaacgaaatgaaaacgacgtcgttttcttaacgggtctgggtattagttgggttaatcgcaatcgcggtacagtaaacgcggatttgtggttaatcccggttaaatgaatggttcaattggaaatgtatgtttaagcatgaatccaaaaatagatgatgtaattttgggaatatgaaagttgatggtggaaatttaaaggcccaaaagtccgggtgtgaaagctgagaatcgaaatagtttatggctcgaaaatcagccaacccaaatttaatccactaactagttctctaccaaatcgatcaattctaggtgtttgtatttcaatattgagactacaattttatacgttttttttttttaataatagcaattgaaaatgcatgtttggatcaagtcaagctttttgatataatttttttcaatgcacaaaatcgagtaagaaaaatcaaacacagaataccattaaactgaataggaaattcagagaaaaaaaaagggggaagtgtttctcggagcattccagaagctagccatagcttatccttttacgttctcgtcagctgcacattagcttgatggtgacatgtccctgccacaagcaactcttgactcaagcctttgaaggcatctctgctgaagctgctcatgctttgctcttgattttctgcaaacaatgttgatgacacagcaaacccaggttatgccccaacacagggaactacgtacagaaatacgaacaaagttttatagaagaaaacttgggagaatgaatcacaagaaccaaattacacgcccggttgcaagattttatacaaaggttgaagtcagtcatttgtgagaatcttgaaggaaagcaaacataatcttcatgccttttgtcaaacagtaagctgttcatggaaaaactccattcagatcttcaacctcagtctagagcttttcactgcagaaatcacagtttagacccaaaggcacacataatcttgctcagcagatcagatgaatgatatactccaactttttttgcatcatttccccggtgacatgaatggtgaagtccaaccgccggttttattcccgctcccaaacccagaatttgaggtttcgggtctgacatttctttttgaggtacccgcaggagataatgaagtggatgatggcatgttcatctgcaatgggttttcagtaaaataatggtcaagagcatatttcgtgatgatcagtatcgtgttttaatcatttatgctatatgtagttcatatcacaatatagagctcgttgatgacaattgaccatgcaaaacaggtaaaagctttaagcagagaaccatgcagaactctgaagcaacacagatgcaggcatgagatgctaacacaagggggagggttgcaggatacaacatttatttggaagaggcaaatgaataagcacgtacattcttgtggacttgatcaaaacccagactcctccctacagcggtattaatctgtgggcttggaccactggcattagccggtctgacacggtcagagacttgggcttcatgtgaaatcttagttcctcctgccaaacggagagttagcatcaagatattgaaataaacagttgcaacgggaaactaaatcagccaaacactctatgccagttgagtccagtgtgaaagtcgagagaaaacaaaaaacacatcatatactattacaaaattaatcagaaagtgacacaattaaaatttataactcgagctgacctcgatgattgcttgtgtccattggtattgcacgagcattactagacccaggaacggcctgcagcatgacagtttattgttaggaagacaggcatatctatatttagcaccaaaactaaaaaatagcaaaaccaagtaaaacttctccccaggaaatcttctctatgaacaagacaaaatatgcatacacctggagaaaaaaaaataacaaatggtattgataaactatacctgagactgacttctagttttctgtgattgctgatactttataatagtccagtcatatatatagtcaaactcatatcctgcaaagaagaaaacgtttaagtgagctaggtagataactgatgctagcagagaggattataaaaatgatggagggatgtctttctcaaagtaccttcccgtgagaataaatcacgaaaaagccgcttcaagaatccataatcagggcgttgatcaaatgtcagtgtgtggcaataatgaaaatatgaagcaaactccacggggtggcttttgcatagaacctacaaaggatgggatattattcagttgaatgaggattaacaaaaaacaattcactcacacagtagagggaaatagacctcaataggagttgatatcttcttctcacaaattttgtcatacttttgcttcttgtcaacagccttaagaccctgccatggaaggctagaaaaggaggttcattaaaataggaacaaaatgtaaagcaagaaaacggttaagtaaatctcaaacaaggaaaaacaataccctgccaaaaacacaatgttaactaggttctttcaagtcaaaaagtcaacacaccttcctcttaagaagtacagaagcacatatccaagagactctaggtcatcccgtctaccttgctctgcgaaagagaaatcgaaatatgtgagcaaaaactttacttcacaaaggggagaaaaaagtggcagcattccttaccaataccaagatgtgtattgcaacttgcatatcgtgcagttcctgttaaattcttgttttccctgaatacaaccaaataaaaggtaataagttgtataatgtgaccttaaaaacttataacagataagataatttaccacctccagatggtagacacaatataatgaaccatggccacaaatacctataagggatgtggcggttggtgttggcatcacgatatcttttggccagtccaaagtcaattagataaacctgattcgctttgcggcctaggcccatgagaaagttatctggttttatatctctatgcagatatcctttggaatgtacatattctattctagttagctgtaaaatcggaataagaaaatcataagcacattagatgataaatgtataactcaagagaaatgattagtatttaaacagaaccagacgcaataaatgtgattaaaactcatgccataccatttgatcagccaacatcaagaccgtctttggtgaaaattttctcccacagtagacgaaaagatcttcgagacttggaccgagcaaatccatcactaaagcattctctgttccatcaactccaaaccatcttatgcgcggaattccacctgcaaaatgagcattgtactgataatcaatccctccaatgaccaacaacgacagaatgggaaaagataggaatgagaaacatacttcctccttcaagagttctatatagcttagcttcatagagaagctgaggatgttttgttttactgttctcctgcaaaacaatccaaatgatctgagttaaagacaaattgtcagctaaaaagtaccatttcaaggagcttgactgataaatttagagttaatcaattcaaagaaccacacgaaacaatgaacatgatacaaaattcccagagtagattcgtttaatagctgattcaattgaaacttacgatcttaacagctacaatctcgaaggtatcgatgtgcgtagctgcgaaatcaacaaacaaggtacgtcaatttcaaaccaaagaagaagaacaaaactcgagaatcaacgagaacacacctaggaaaatctctccaaaggaaccaccgccaatcttccgtccgagcttgtacttgccgccgatgatacgttccatggcagctccgatcacaaccgaatctggatcatgcgcaagggatagagatatcaatttagggcttttttacttcgttgaatttgagagttgaaatttgcgaatagatgagacaataggggcattaacgtaaattgtatggtatagtaaggctaagaaaatttgtgtgtcggtgacgtggactgaaatttagttgccacgtaggaccggtggagtttctaatccactagttctaaagtcaacgcaatgtgtctaaatatggataattttggggataattttgtattggattttgtctctttttactagggttttagcttttgaatttgtttttttttgtataggattttaacaaagaaaaaatggaaaaaaaaaaacttcttcttcttcatcatgattgctcattcgagttatcaatgaatcaaagacacacaaaaatcctcacaaaaacaattcagaaaaataaattattaaaaaaaataatgaaaaacgaatttacagtccgtccccattaacctcgaccgcggtgctatgattgccggagcctctcctcgttccgcccgctggccggaaacttgaattagaattgcttcttcgagcattccggaggcataacacctttaaatctgttagtgtccttgcaataatcatagatcatgaaaccatctcttatcttttgcatcttcgtcagctgcgaagcagtgagctgactaaatgatggtgatgtccaccaattagaccgtatagttggatctacacattgcttgatgctgactgatcccttccacaaacaagctcttgccttgtacctacgaccctcggccacaaatggtgctagcgtccagttagtcttcactcgacctccttgtgttgcccagtcttctgcgttccatagactcgcaaacactttcataccttgcttgttcgggtatgcgattccttcactttcgtagtttctaaaaactctgatcggagttccatcgacgaaccacctatataagatatacaacatggtgtgcgacacgtttatttatagaaaggaaataaaaacatataatcgtttgagattcctaaagtttttttggtttgaaggttcgaaaacattaaggaactaaaagaaaaattcatcatgaagtgtttgtactttaatgttgttttacagtaacaaactaaactatctaagtaacatttaatcttacttaagtttttttgatgtggtatttcattgatagaaagtaccatttcttagcatttgtttggagtttttataaagtacttaagaaaccgccatagccataagttaattacttacacaacttcggatgggttccaatggatggtatagttgtggaaaccattggtcgggttgaaccatggccggaattgttgttcgcggtttcctttcccttgagcatataagttggtgtggatcgtgtacggctgaccagtcgcatttcctaggaactcgaagtctatctcatcgtgtgtacttcccgtagacgataactacaaagaaaaatctgaaaacattaatctaatttttctatatataaaagaattgcgtattgattctatttttttttattttttttgtaattctatcgatcgagttcaaaagaaaattttacgtaataggctgcaacggttccagcagaattccctggcacaagtttgatgagcatttctacgcttccaaacaaatgagccacctttgatttaatagcagatcctgcaaaaacaaacaaaaacataaaaacagttatacatgtttatctatcaagtttctcatgaaataatagactaaaattaaatggactgattttaaagttattgtgttataagattactatatacctgcagatttgtctaggacaagtcgaaggttggtaccattcatgaacatgtgatctttaccccatgtaacaataaaattcttactgaagtctgcctccacaaatgtgcgaccaagagtcgctaaggcagctgccagaacgaacattaacgtcttcgcttgaagacccgccatcttacgaatttgatttgtgtttggaatgttttggattggaactctattcgatcaccatttgtttgtcagtaaggctttctttatatataacttctaagaaatcgaaattttgacgtagtccaaaaagtatagagttttgacaattgacgtgcatctaatgaactttgtatgcatgaattagacaacataacaattaaagaactaacttctttaatataaagaaaatgctatcctggaaaggtactatgaatatgtatgtttcttagtttccaatcaccaacatgtgtttgataaataaatattagatagaaaaaaaaaaaaaaactaaaatataagaagatggacactgttagctggctcacgcggttgtggtagaggccgaggaatatacgtggggaagactccacaaataaatggggtcgatgaacttgtcaacttctcctcttccaaatcagaaattttaccaatagtaacttcgtttgtcatcaatctgttttattactctattgttccttacgatttccatatttttaatcaggtattttcgtctcgttgcatactgcatagggcttagataaaaaaaatccgttacattgttttaggatttcatgaaaaaaatttaataaatcatgcttaaccaaaaaataaattttgatacattttggttttacttttagatagattatatttaatttggtttgttttcgttcacataacagagattggacactcatgaagtggtgaaacattgtaaacaacgattctccatttagattagtttataaagttcgttctaaaagtgcaagacatcattaaaacgtgttttaaggtttttttatttaatgatttaagcaaggaaatccagtgatcagtcaagaataactttcggtgggtgttgaaatattcttgtatattatattcacaataaatctggatcaatggtaaatagacaaacattgtacgagaaaaagtttgataatgagtaaaaggtcatgttgatcgcgtttttgttaatcttgttaagaaatcataattatatattcaaaacctttagtttcattttcattccttgtgataattagatcaacgccaccaatcaccatcagtcaaaattattgtatcgcttaccacaatccaaaagagaccgaagaggccaaccaattattatattcttacatgacaattaaatttaatcttaatcacaaaggcaatcaatcaacatcattttatcgatgatgtcgtaacattgttggctcttcttacaacatataatcatataaaagcatatggcttacttttttatttatccgaaagtaacttttgtcttagtttttttcttaatgtatacataagagggtcagctctatttacaagtatttgccgttacatgaagtttaaagaactaactattaaggatattcaatagaggaggcgatgaaatggacaataagaaagtttacaaaagtgaggtaagcagacgcgattacccaaaaccccgagttaccaatcgaaacctttacgtatatagttttttattcttgtattatacgaatatccacactacgatctagtattagccgttcccgtcatgcagattctaattaatgatatttctttgtactccaaattagtactatatatggagtcatgcatggacaatactttatgactggtctattgaccatagaaacatcttgatatcaaaatctgataccccaaatcatatcaaatgacctatatattatttctcttaactgctttgaatgtataaacaactccatggccttatatccaataatatgagttcatacataagtcaaagttacaatctcaattccaaatctagctcgtttgcttcactggtttcgaagttctgaatacccgatcccaacgatatatttctctgatcctataagattggaaaacaaaatcattcagagagatccgcatgtaaagaaacgattttgaaagaattaacacaaattatcatgtcaaatcttagtacattctaaccactatatctcttaagacatggattaattatttgtatgtatactatatttatgtatatataaagtaataacctcatgtaagaagtgtctggttgtgtttggttccacaaaatgctggctctccaagatgccgtagctcgggttccaactgttgtaagaaaattattagctttatttttaactatatcacaaacatttaagtgcatatatataaacaacataaaatttaagttaaatattgtttattcaaataatctttaacaataacaatgtgtacggactgaccttggtgctctgtgaggctgagaatctccgtatcttatggttgttctctcgtattgatcattatttgcattcatctgtgagatcacaaaaagggcaatgaaacaattattgataaaaaatgattattcttgattattccaccgatcgagttgaattacatggatcttattatttcacgtcaacgattggaaactagtaattaaacgatatacaatttgttaagaatgcttttatcttttgcagaaaacaagataattaagacggatataactgaagatcttgcgaataattaagatgagatatttcaaaccgaaatgatttcttctaaagctaagttaagaatctgatttaaatttcttctaaatctaaaaagatgtgcatttaagaataaacatgtgatgtgtatacatcactagtttgtggaaagcatagtgctagatacagtatatgtaaaaatacacatgcatatgtatgtacacaactttgaatgtagcatatttatacataccatcatgttcggatgaaagccataaggagctggtggtggtgatgatgatgcatatgaaaaggatggtgatgacgatggtatggatggatatcctccttggatcctcacatcctcctacattattcaacattcacatacacgaaacttattcatattactcatttcgatcaacaagaagaaacaaacgcatgctgaatctaaatcattctgcaattcgatttagacattacgtctcaaaacacagacaaaaaaaaatacagttagctatcacgatcaaaaagaaaattgcatccaaatcatccttaatgtcacggtagaaagattctaaaccagagtttttttgatgaaattctaaaatttataaaaaacaattactactagactatttttacatggatctatagagatatgtatatgtgagtgaaatttgtacctgataagttgagggatgataagaagggtaggtattgaagctgttgcagttatactcgccgtgtaatctaatcttctctaactgcgcgacgccgagacctctctgaggctgcttaggcttgtcagaaccattcttgttcttccctctctttgccggagaagaagaagaagatgttggtgatgatgacgaagatccacccatttttggtctcccgaaaaaactactacccatttcttggtttatacaccggaaaaaatactaataatcaaagaactagagagagaaaatcttgctagagagagaaaaaacccaacaattgtttttttttcgttttgtgtgtgtggggttggtttggctagctttgagctgaggaatcgaagagatctctaatggtgatctcttctttataagcttttttattttatctttttaaaaaaggattttttttttaaaaatcttttttatgttttgttattaagatcagtaactactgcctcgctggatcagattgtgtccagatttcattagatacttcccacacacacatacacatacatagattttatgcccttatttgatttcacaattaattctgacaaataaaacatttattaattacaatgattgtgcaatatttttgtcgtatattataatattatcgtatttttttcattttttcttcggtcttgtatgacttccaagactacaatactattcgatttaattactcaagtttgaaaattttaatatacctatagatcggagcttattactatattgttctcgtattgaccttgataattacataaaagaatagctgacggattagtattttcatttactctacgtagaataattattaagacatgttattcttattttcagatgattttttaaaattaataaaattacataataataaggtttaatatattacacgtacgttagacacgtttcatttacagcttgtcaaagctttaaaacgttaaaaccaaaaaagaaaaaagaaaccgaatcagaaacggattataattagccttagacactatagcttgaacattttgtgtaagtatttcgtttccttatttttcttccgcatcatagctttctcaaagtatacttgttttatcattaatgcgttaatcatatataacaataaatctggtatctataaatgatttttctgaggcagcaatgaaatatataaaagtagcttaagttttgtatattactttttaggagatgtattgtcgagaaaaaacctataagggactcactaagaaaagcagaagcaatcgaactatataatataacgtaaatacgagtaaaatgtaactaattacatatatcagtttgtgtcaaagtcattattaaatttacagattcaacacattttaatcaaaaaagtgaagctttttgtagtatctatattgtacacgtgtgtacagaaccaaccttgatttttagtcgcaacgcttatttattttattttattgtattaaagacctaatattacaatattttacgattattcccggaactttccctggttgcatcttctgtaaatgttatgtgagtgtgtcatatatgacgtagttgttgactattaaatattaaacatttacttacttttttcttttttgttaaaaataactacaaaggttacatagtagagtttaactagcagaagattattattttacgtaatttcaactaaatcagtttcgtttggcacgataaattttggtgaaaaaataaagaagatttaatatgtattaaaatgtcaaaaaaataatattttaaactttcattaacatctattcaaatacgttccgctatataacatattttgcaatataattaattccgtattattttaaacatttatatgtttagatattcaaaatatttattattttgttaaatttaaatatataaattataatattaaaaactttttaaaagttaactactcacaattatatgcgttgccaaacatccaaaaagtaaagaatcccgattctatcttcaatcgttttacatttgtacactttccgtttcaaaaaaaagtggttgtaaagttattttgtttcaagcggaatgtcgttttatcctttatccaaagctaattttcgaaaatatattatagcattaatgacattatataacatcatatttgtgttaggcatttttttttttaatttacgttaaatgtgttaaatgacaatttttggaatatggtagtatttattaaaacaatttataattttgtgttagtatgtttgtatatattatatacaagacacacatatgttgtcattctcaaaagggacttaaattgcaggctaacagaatagtgttcttaaaacgtgttttagttctctattttaattaattaattgattgattgattgattataaagtcagtacatatcacccggtcgaggccttccttggatttagaatcgtgccaccaaaaataatttattcaccccattatgcaaatatttatttaattttaacaatttcagaatgtagtctgagggctaaaataccatccaacaaaaactactaatagtagtctaattaacagttcatatatatcaacaaatttatctatattcatactgcctaaagacattgtgtattatgtatatgattattgttaccatctttaataactagcctcttaaaatttcttcagttctggtgtggctcctttatactagcgggcgtgttttggctgtagtatagagacagactatcgatgaacattattatttagctacaattatacttaatttattattaacccaaaataataattattcatataaatactaatgtcgtgaatcatgtgattccccgaacatctctcctagccttattaataactccataaacaatatttaagtagtaaagggtcacatttttaaaaagacaaggaactaacaggtgtgtgacacttgtaggtcagatgctaacgaattaatattctttcttagtaatgacgccactttcaatttgatttacaagtaaattttattaatttagtgatatgtttaatagtttttgattttgaatggtagtagtaatatttacctaaacacacgaacgattgagataatccgtcttcggtctctacctgcggacatagaattcccgagttctctctatttactagcccgttttggtccttttggacaatttggtcgtatcgatcatattttagtgattactattttcaacagtatacaaaactttcaaattcgctataaataaagcaaaagaagaaatcggtatttatggataggacgattataaaaccttctgatataattctgatcgaaattccatgaatgttgtttaaattctcaaagttacagtgacgacattaatataaagttataaaccactaaattatatatcgtagtagcataataccataaagcatagtggagtaatctatacaccaaaacttgtttaaaatccattaaataatatctaccgtagattttgtgcacatgcatttccctgctacactacattactactgtctatctctttctgtatgtttctttaaatgttgtcatattattatttataaatactttctataaaatatgaattcgaatcaaatcttattgatcctcttacttaccttgacaaccaatcaacataaagttccattttattttattttaaatttaatcataatcataatcgttagttatgctattttcattttgataatttgacagtttccaatacagtaaaaatattgatgtgatcgaatcttagtttctgataatatttttttaggaatatataaaagataaaactgatggtattataaagcatatcaaactcagaggtaccagtacgtttgttacataccagagatgcgagaattggattaaactaacaagctgatcaaacatcaagtactaacatgcaaatcaaacaaacaaatcaagcaaaataaaagtagtaacaaacaatctaggtctgtatttagatatgtgactgattatcacaaactttcatgtattcagtctttcctgcaacggtcatttattaaatccctcttgtatctgtacgtgagcaagagacacatgcatcatggacgcatgggcttattttctttctatttttgccacagaaaattattactgtttgatgatgtcaaagaaaaaaaaaaaaattactgcttagagcatttttttgtaaaatgtactgtaatattttacagtcacattatttatttatttttgcataaacggtaatcacattagtggtaactaattttaattcttagttgaagatgataaggtatatccaattaatttggcttcagttatggagactaaagttaattcaataataaagtagatcatggtcacattttttttttttttggtcacagaagatcctggtcacataaacacacatgcataatgtcccaaaaccaactggctgttcaaatttcagcaactattaaaaactataaataaaatattctgaagattttagacacatgtgatgtatttttctggcaattatttttaccatgcttttcgttgtgattttgcagaatgtcctgctgacgtgcgtattatacaatttgacaacttaattacgtcggagttcaggtttagacaaatgccaacagtaacaaggacgaaaataatggattgcgataaaaaggaaagaaaaaatatgtggtgacctatagctttgaatttaacagaatttaaaccttttagctaactgatatgaatctatgttccataattcagtatttgttataagctaaatggtttaaattctgttaaatttctttggaaggttgtcatagatggatattcgaaacgaatttaaacccttttagctaataattagattggtttaatttgaaccggacagaaatgaagcatccaatatcatattcatgtaaatgttagaaaagttcaaactatgttgacttattgctctagatcaagcaccatacacattataataagagtcaagtgttcacatctaaagatcttataataattagtatacaaattgtacttatttaacttgtgaaggttaaaaggtttgattataaaaaatagatttcggttattaactaagcaatcaggaacaagaaaagaaaaaaaaagcgaagtgtttgacaaaaagaagagcatctctccacatgcaagggcttcagagattcaggaagctgatatcgcagtttccaaggtcatctctatctacttgtctaccaaactcactttagattatatattatactaccatatacactgatatgatttgtctacatgatcatctcgttaatatatactatagtttatttacattgatttcgttttaactactcgaactatttttaaatgatcacaagttgaccatattcttttacgcaagctatttctatatgtcaagattgataattggtgccacatcggtgaataaatcatgtttttaaattggaaaaatacattttgtacttcataagagcgcaatcttgtacaatgttctcaaaattattggttagtcattttatagagttaagtgttcgcaacgttcatttttcacaaatctactattcgtataagtagttatagtaatatatgtagtttacttagaaacatatagtatgcaaatatgtcgaagttgtataacaaaaattatcgaagtcgtaccctccaaaatttcctaattgtatatgcctataaataaaatttgaggacgaaaaaaattaatattgcaaattggtttggctcttcattctctctcttccaaagtatatctgaaaataaactaaaatgaaaattcgtagctaaaacgacatccctagctagttgtcttgcatgatctatccttggatatgggcttatggacatgttggtttgtttttaaggttaaccctaaattatttgcctcatatattatatagaatcataattatatatgtcttcaagtagttataatgtattgttttattatattgttcttcttaaatgacattgtttcttccgtcggatcggataacacaattatacatatgctcaatacatgtgggagcttcaatttttttgtaacaagttgttagatatgattgtgtgtgtgtgtgtgtctatatactcagtgaatcatgaatacgaccaaaaaacgacgaatcatgcaaaaagaaatcgttcatgaaaagggggggggggacaaaagtcgtataattcaaccaaataaaagtatattatcaaaattacaattattgacatttggtgattcatttccaacaaaatctactatttagctaatacgagaaatccatctagtaatattagttgactcataagcaatataattgccaaagtaagagtttcggttagtttttgtttaacgtaatattaaaatgagtaatgtagtcgataagggtacgaaatgttcgtcccacgtgggagaagatataattaaatcattgagaatcgtttgatgctgaatctttattagctctaagcatataaattaaggagtatttgttcgatgaagcttccttccttcaccatcaaccatacaaattaaataatagtgtagtaatacctttccaactttttcttctctcttttctgaatgattacttgtaacaatcttttagatagtacagatttgatccattggctgatttctttttatttatctattcagttggcatccatgctgttccttctattatttcatatttttctgtggttttttccacaatgtatgtaataccaaattttaggacttgttcatattttcttatttagaaattttgtgacaactcttttcagtgtcttgaaagtacaacatggttggatcatctgagagatcactaaagtctcactgcttaggattgtatgatacaattttgtattaagctcaactgtctcaggtgaaacaaagacttaaaccggttggtgctggtctcagacttgaaatgtctatacgcatctgcaatatgttttgatagagcacagtgtagccaagctgccacctattttcaatgaaaagctgtaaatttgtctatgaagaagaggttgatttgtaaaacttgagttcataccatgaatccttccatacataatcaatcttatctcaaagctaaacattacatgatcgtggcggtctagttctgtctaggctcaaaacgccagagatcaacggcaatatcaacttcttttcgcttgtggaacttgtagagttttggcaagtcatatcggagctgcaaggggaacaatatgaataagttagaatgtttagacacattcacatcagacttttgatataataattttcaaatcttttagcccaacctcacatataacttcagcacttttcgcattgaaatcacgcaaagccgcccttttaatgtgctgcaagaatgttaaggttgttactaacaaaatacatagtaagtagatattgtaaggaaggcgctttgcttacttctctggtagatgtcttatgcaaggaataaactgcctttgaggcgacctgcgtagccaaacatcgaatgtaaacatgtaaccgagtgatacgaaattagaaaacagtaaaaagagatattcttttctgttgtttaccttcattgccgcagagagaaactccatgtcagctcctttcttccgtgtaccaaatggagggttcattacaaccgtatccacaatcaggcctaaaacaattcatggagccacaaaaatgttaccggtagaatcttcttttcgttgaatgaactgaaatgaaaggaggattgtaccttttaactctagctttgtgatgtcacactgaacgaaatctatctcgacctacaaaacaaaccaattatagcaatggtatttgctatacaaccaaaagaaaactcatttacataaaagacgaagaatttcaaaaaaacctcaagttcctctgcatttagtgttgctgtttcaagagattcagggtcgatatcgaatccaatcacagacctgttctgaagcaataaagagattagataaccacagagattgaatagaagagtgaggcaaagatgattatactcacgcagcatctagaagagcagcagcagcacttaaagtaccacagccacaaccaaaatccgcaacgaccttatcagttatatctccatatgaattctctgcctaaacaaaggatacacacttaaggcttcttctaagacagcaggaacaaaaccaagcatcacaaaacaactcagactacataaatctaacatccacacactgagaaaatcactagcctgttatatattctagattagacagtgaagacccacttcacagaaagcatgatattaacaaaagtaataaacttcagagcagaggaagacggattttacagtgaaaagcatacgagaagcaatgtgaggaccagttgggtattgctcgaattccacctgccacacaaaaaatcaaaatcaaaagagtttgttcgacgaaatcaatctttagtattcaaagttataatatttttcacatactttaggattggagaactgttcaagatcacccaacaagccttctaattgcttcagcttcatcttctccggcgcttctcaacagtgaattcacaaaaagcagagtcaaaaagcctccgtgacaaatcaatgacataaataaaaaagctttcaggcccattgggctttctttctttctgaagaggcaagtgtaaaccccattgcctccttgattgaggtttttctcttcccctgaatcgctgtgctcgttgtgagagagtgagagatgtgtcctcgagctactcaaacatgcgaaatctgcgagaaggttgtatccaaatacaagtgtccttcttgtcttgttccttagtaagtgttcttcgtctctctctctttttacataggttttctttcgtttcatcattggcttgttaagtcatctttgtcattgtctcttacttggtttctgtggcttgcctgcagctgctcattgggttgtttcaagatacacaaaggtaagttcttttgatctctttatgaaattcgtaaaaagttaggatttggaattagttccttgattgatgttagtttctgagttagaccttaaagttttggactttgtaattgaattcgttgagtgtctctagttttattacttagcttaaacctcgtgacctttgaattgctaatttcattgcagattgtataaccaatagaggaagagtattttatgtatctgttttgttttcaatgaagattttactttaggtttatgttgatgtggttctaagtatgtaatcttatcaataatgcagagactccatgtgctaaaccgtctgatccttcttcaaccgaagaaaagccaggttagtgcattttgtggtttcattgtttcttgattagttttcctttgctcacttgtgtaagttgttcagtgtgaaccatggtttgagtcatgctctggttttgtagcagcttctccagcaaaggaagtcccggtgaaaagacctgaggaagctaatgatgttgtagagaagacacagcaaaaggctagtggtacggttcttccaacttaagtcttatttacattcatgggctgattttcaaaacctctgatgtagccagagatgctaggcattagactagaattgtttgaacttgggtttgagtcataatctgtttttttgtagctgcatctccagcgaaggaaattccggtagcaagaccgataattgtagaggaagaaaagtatattttagaaaagacacagttcgaggctatcggtaatgttcttccaactacattatatatagacgagcaagttattggataacaaacgtctgaacgaatctatagcttcgtaggccatttctaaatctgggaactttttacagcttcttctagtgaaatccgcgaagctctaaaggatgaacctcttcagaaactcatctacagtattgatagttcttccaaccctttacaggtaaagctcatctacatcgtcgtcagtaattcaatatttttgttgttgttatcgatctcctttgacgaaactatttgtggatgtatcaggaactcgatgaagccatgggaatagaagcattccgcgaattcacagacaaggtacagtcttaaaagcttttatttcaagaacttgcaacaatccatgaccagcaaaagggcctccactaagtttcccactttgtttttttttttccagattttatcaaacatttcgaagagtaatgacgagcagtgagtgtagtcgcttcaaaactccagtagtattcttgcttagtgtattcgttacatagtttgagaaaagtttcagagaaatgtttactggctataaaaacgagccgttttggtttacacaaaccatctcttctctgacccccaagattccagcttctgacatttgcggaaacagagaaaaaaacaaaaaaaaaactggaccatcttaaccttaaacagaccaaaaatttcacatctggaccatcttcaaaattgtgatttgcagatagaactgaacctttttttttaattccacaacatcaacctacaacaaaacaatagagatgtgtctgtcaaaccttgaccattatctcatcagtcatcactcaagaaaagcttgtaaccattccctgattctttctaacctgttggttggttgttctgatcattaggttccttgctactacctgcctggcctaaactcagctgtgatgttatttgttgactctataagaacatttttaaaaagaggatgggtcttgtgagcaacgtcatttgttggaacagaggaataagcacaatggatattgggaaagaattacctgcaatggaggaggaagagattgttgcatctgatggtgaccaacaaactgaccataaggattcatctgaggttggttcgacaccgggttaggctgtggactttgtaaccaaactctggatgggtcaaaggtctgaatgtttggaaaagggtatcgcggtggtggatatgatggacctacacccgccatatgagcctggctagggaaaggtatgtatgcaggaggctgattcatacccatggccatgtggggcatgaactgctgcatattcgatgtatacatcatcggtggcatcataccacttcccattgacatcatcgattcagatattaaaaaacctcattcatgatctgaagattattcatctacataattgctgtaaaacaaattcatgacttgcaagaaacagaagagcaagacctcaaggacatataagaggaatcatcttattaggccaaccatctaaacgaagatgaatcttcagacatcaaatctaaaaagaggaatcttcaggggcatacatttatttgcatctctagagatttcacgtactcgataacatcttccagcattgaaactttagtagactgatcagagtagaaccagaaccagaatgagaatcaagtttaatgacaacaagttatgtgaaactgtgagagaccttgttgcagcgaggaatgagttgttgcagagtcttcattctctcgttgatcttttctctccgtctctgttaaaacacaaggtacgtttcaatggaggatgaaacagagagtccattgttgaaatcaaagaatcttgaaaatgcaatggaaatataacaaccctttcggcgaggttatgcatttctgcagctcgtgacctcttcctagacgttgaacctcgagcttcttcagttccctgtacgccaagaaacaagaaaagggttaaactgcacgcgtcaagtaactaacacgcgctgacatgagtgcgcacttctcggagcggtaactcacctggattctcggagcacttcttggagcgataatctgaccgtacggagcactggatggtggttttggtggtggtggtgccagagagacggaactctgcggatgaggagccggagtggaagcataaagttcagagcacaaataatcttgacggagtggatgatggggccaagaagacatttcgtcttcctggatgaagagattctgatgaggcagaggaggcggaagcggagtattttcttctcgtccgccacttccgctgccacggagaatgggaagaggatcggaggagggtatctgtgtctggccaatcttacataagagctccactatatcatcttcacccctagtttcaaaaaaaagtttaaaaccctaataataaaagattcatggaattacagagtgagaaaaaaactttcaagtaagaagataaaagaaacttacatgatggaggggaatttctaatatgatcaagaaggaggaagaaatagaacaaaaagaagaagaatctgtgatgatataatcatcataggtttccaagttgaagtcttgaacgaaaatgattcatatcttgagacaaaagaaacaaagtttctgagagaaccctcaaaacacaaatactctctatatatatacatattagatatttgtgaattgtaccttttatcaggagaaaaaggcagatatttgtgaaagaaagaaaaaagaaacataatgtcgtttagccagaaacctccaaaggaaccacccagaggccagaaaaaaacatgcagattcattgatttgcgagttccttgttttttttttctccattgtctgattctctctgatttttttgctagataagctctctctctgtctctctttgagcgtctttgtgcgtgctatgacttttggtatattccgaatgacgtcaacagcccactttggtctcactcatggctccacttgtacgtgtaaacaaaaatcaccgggaaatataatagtacgagttttgtatcaaccttaggaaacaaacagacttcttcttacgccatcctctttacaaatatcattaaatatatatttagtcattttggctgagacataggagatgttagtcagtcaaaaacggagactaacaggtgtgcttggttatattttgctattttgcagataatttattttatgattttttctccgaagaaatagattttcattttctgaaaaacatttgcatgttagcaccttcaaaattgtgcttttcttagagaacagatcctttttttttaactcttcaacatcaacttgcaataacacaatggagatccatctgtcagaatcttgaccattaatgtatccggcaagaaaagcctctggctgttcctgattcctactaacttgttggttggttgtcctgatccccaagttacttgctagtacttgcgtggctgaaactaggctgtgatgttggttgaccctacaagaacatttagaaaaaaggttattgatgaccatcacccattcgtaggaagagaggcagaataacggcaatagatactgagaaagaattacctgcaatggaagaggaggttgttgcatctggtggagaccaacaaactggctatagggatttatgtaagccggaaaccgaggctggtttggcaccgggttagagtgcagacttggtacatggactctggataggtcagaggcttgtgtgtctggaaaagggtagcgcaatgctgggtatgatggacctacacctgccatatgacccggcctaggaaaagttttgccggggaacggtacgaaaggaggaggccggttcatacccttcatccccatggccatgtggggcatgaactgttgcgtattcccctcatgcatcatcggtggcatcataccatgtcccatcgacatcatctggcataacaacattgattcatatattaaaatctcagttataagctgtagattcttcaacataatcctgtaaacgtgtgaagcaatacagaagagtaagacctcaagaacatgacttataagatttgcatttatcttccatgacactttaaaacccttccaagatgaatctgcagaaatcaaatctaaaaaattggttgtttaaaatgcagagacgctggttgataaacaaagagtataaccattccatagcactcaaataaccatgttcaactattccacagcacttaatttccggttgtgttttgctttaacacacattcagtttttgagtacatgcctgtatttgcagctgtagcgatttcacgtactcgataacatcttcaagcattgaaactttatcagtctgatcagaatagaaacagatgtcatcagaatctaactttttttatgtttaacagccacaggttataaataactgagagagacctttctgcagcgaggaaggagttcttgcagagttttcatcctctcgttgatcctttccctccgtctctgttaaacaattatacaaactacgttttaatggagagacgaaacaaagagtccattattaaaacctagaaagtaaaatataagaaccctttcggagaggttatgcatatctgcagctcgtgacctcttcctagacgttgaaccatgagcttcttcagttccctgtacgccaagaaacaagataaaattaagccttgactgctacactgcacgtgtcaacaggtgaacctatggtagctgtgactcacttggatttctgcaatggtttcttctctcttcttatcttcggtaattttcgtctccctctccggttgtatttgaacccgctctgtttcggccttgtttacccctgaatatgatgttccggccgtctcggttgccacctcctttcccctccgaccaagaccaggaactgcaaaagtacgggatactccggtaatggccgccgctctactctcggtgccgtgagtcgctggtattacacaggattcagcggctgaagacgacggggtcgcgcttgagcctatctgcgtcgattctataaccaccggaccagcttcaactctaccgccggaaaatatgttccctcttagcctcaagaagttcataaaattctctgtccttctctcaacgggaatctgaccgtagggaacactgggtggtggtggtgttggtgctagagaggcggaactttgcgggcgagtagctgaagtagaggcgacgccagaggaaaaataatcttgacggaggggatggtaaagccaagaggccatttcgtcttcctggatgaagatattttgatgagacggatgcaggggaggcagaggcagaacagtttcttcacctcccccacttccgctgccgcggaaaatgggaggaggaatgggtctctgtgtctggatgctttgaacgacttggccgcttttccataagagttccaccacatcatcttcactcctaatttcaaaccaaaatccaaaccctaaaatatcagactcgtcaaattgcaaagagtaagagaatgaaaggaaaaagaacggaaatgtacggagcaatgggtggtggtggtggcagggaaacagaactttgcggatgagtagccggtgtggacgtgacaccagtgtaagaatagtgaagccaagaagacatttcttcttcccgaatgaagagattctgatgatgcaggggacgtggaggttgtagaagtggaagtggaaggggagcattttcttctccgctgccgcttccgctaccacgcagaatgggtggagtaggagaaggtttacccgaggaaggtctttgtggttggctggttcgaacgacttggccgttccataagagctccactatatcatcttcacccctaatctcaaaccaaaaccctaatcatcaaaaaatgtgaagataaaactttagcaagtaagagaaataaaaatacaaaaaggaacttacatgatggaagtatgctataggaagatcaagtaagaggaagaaagagaagtagaagattcaaagtatggaagttcatagcttgagacaaaaagaaacaaaaaattttgagaagagaagagaacagaaacacatgtactggaaatttttgaattgttaactttcaacaggaggaaaacaataaacaaatgtgaacagtttaaaagaaataaaacaaacgtcgtcgctgtttctgtcggtttacccacagagtagaaaagacctgcataatatttggttgatttgcgagttcgaaacctagattttataatgttgttttgttttgtagtggttggtcacattcgttgaatttatttttccacagtcttctgattattttttcagaattttgtgctaagatatctctgtaagaaacaaaacattccaaatatataatgattagattaaccttaggaaacaaacagacttcttcttacgccatcctctctacaatatcaatacaaaaaaaaagtcatgttgcgtctttctctttttctattgttttttttttgtttacttttctttcaaacaaaatacatgtagataagttcatactaaatcttataataaagtaaatattacttttgaggcagctgcaattcactcttcttttttcatataatactactaagtgtttctttttgagttttgacgtaggaggtgttaagccaatcagaatagcttatacttggcttataacgtaggggattttttcctcacatttatctccagtgaaaagcttctaagaaaggttgatattaacgaagatagagctgttttattattataagaaaaatgcttacaaataaacaaacagtcgcacttggaacataaagacgaggatgggccgcgtgtacttttggtaagtcattgtgtgtttaatcagtcgaacatttggtctccgtagaaccagagagtagggacctcacatgctagaaaagggagatactggccacatcgaggaatcttaagcgtgatgcacaaatactgaccaccttgcaacctgtcagtatctttcccattaactaaaaagtacttacattaaacttaacagacaaaatctacatgttacaactctggtttatcttcaaagttgtaatttgcttgaagaactgatccgtttcagctccacactttaacctgcaacgacacaatggagatgcatctgtcagtatcttgaccattaacttacatcccaaggaaacccttcattccctgattcttactaagctgttggttggttctcctgatcctcaggttccttgctactacttgcctgcccggaactcagttgtgatgttgtttgaccctaagagaatatttaaaaaaggatcttgtgagcatcatcatacataaggattacctgcaacaacacaatggataccatggtaaagagttacctgaaatggaggaggaggaggttgttgcaactggtggggaccagcaaactggctatagggattcatgtaagccggaaactgaggctggttcgacaccgggttaggctgcgggcttggtaaacggactctggatgggtcaaaggtctgaatgttgggaaaagggtagcgcggtgctggatatgatggacctacacctgccatttgagccggcataggaaaagatgtgccggggaaaggtatgaatggaggaggtcggttcatatccatggccatatggggcatgaactgttgcgtattcccggcattcatcattggcgacatcataccctgtcccgtcgacatcatctgacataacaatatcgattcagatattaatatattatacataatcctcctgtaaactgggaagcaaaacagaagagtaagacctcaagaacagtgcataataagaggaattagctattaggccatcccatctaaaggaggtaccagtgtttcgaagtagagacttataagatttgcatttatctcccaagaaactttataacccttccaagaagatgaatctgcggacatcaaacattcaaactcttcggagacgctggttgatagagaccaaaaataactctagtaacctcaacaaaactagatacatatgaactctttccatgttgaaccattggtttaaaacacattctgttttgaagagcatacttgtatttggctctgtaacgatttgacgtactcgatagcatcatccagcgttgaaactttagtagactgatcagagtagaaacagaatcagattcaaccttcagttcaataaaacaacgaggaatataagaaattttgggagaccttgttgcagcgaggaatgagttgttgcagagtcttcatcttctcgttgatcttttctctccttctctgttaaacaaaaacaagttttacaaacaaaagtacgttttaaaggaaatgaaacagagagtccattgttgaaactccaatggaaatataaaaaccctttcggcgaggttatgcatttctgcagttcgtgatctctttctagacgttgaaccacgagcttcttcagttccctgtacaccacgaaacaaagaaaaaaaaataagccttgactgataaaatgcaccggtaaagtgagtaacacccgccgacatgggtgcttaggttaacctatgggagtactaactcacatgggtttcttctctcgcttttagcttcgactccgttgctggttgtatctgaaccggctctgtttcggccttgcacactcctgaagatggtgttccggccgcctcaaccgccaccgcctttcccttccgaccaagatcatgagctgccaaagttcccgacactcgactcgcggtgccctctgtagctggtattacacatgattcagtggcagaagaagaagggggggtcgtgttcgagcctacctgcatcgattctcttaccaccgaaaacgacggtccagcttcatcaactctaccgccggtaaatatgttccctcttagccacgagaagttcataaagttttccgcccttctcgtggcgatagtctgacgtggtgccagagagatggaactttgcgggtgagtagccggagtggagttgagaagttctgagcagaaatagttttggcggtaagaatggtgtagccacgaatacatttcgccttcttgaatgaagagattttgctgatgcaggtgaggcggaggttgtgaaaggggagcattttcttctcctctgccacttccgctgccgcggagaatgggaggaggatcgtaggattgtctatgtgtttggttggttccaactacttggccgctttgccataaaagctccactatatcatcttcacgcctaatttcaaaccaaatccaaaccctagcatcagactcatcaaattgcataaagtaagagaattaaaagaggaaaaaaaaaaccggagctgtacggagcattgggtggtggtggcagggagacagaagaagccggggtggacgtaacgccggggtgagaatggtgaagccaagaagacatttcgtcttccagaatgaaaagattctgatgatggaggggaggtgaaggctgtggaagtggaagcggggcattttcttctccgttgccgcttccgctaccacgaagaatgggtggtggaggaagagatggtggtgtattggaggagggtctctgtgtttgactggttctaacgacttggccactcttccataagagctccactatatcatcttcacccctaatctcaaaccaaatccttaatcatcaaacatgtcaagataaaacttgcaagtaagagcagagaatctcaaaggaacttacatgatagatggattttctagggaaatgagatcaaggagaaggaagaagtagaagaaaatgaatgtggaatgatataatcatcgttggttttgaagtcgggaacaaaaattatttatgtctgagattagaaacaaatgtatgagagaaaccaaacacatgttacctttttatcatgaaaaggttttttgttttgtttttgttgttgtgagttattaaaaaccaaaaaagaaagagttacttttgtcttctatataccccagaaacctccaagaaaccacttagttaacagagtttataaattgcttttagggccagattcattgagtcgctatttctttctttccccttctattgataaaattctgtgcttttagaaagtctattttaggagcatatataggataagctctctatcactctcggaagtgtgtctttatgcataccatgacgttttcagcatccacaatgatgtcattactctatgcgtcgactcttttggcattctttttttaataaacaaaaacatctaaagagaacttgatcagagttttttgtatcgacgttagaaaacaacatgatctttttctgcctcgtccttttaatttttttacatattttgtgtgacgttaatgagtttgtgccaaatctatcccttaattttgcaaatttctaaaaaatctattattaaatgtgttataaatttatctgtgagactgtgaacgtaggatgactttacccattgaaattcacaatcttgactattaacttatctagcaagaaaagcctttattccctgattcgtactaacttgttggtttgttgtcctgatcatcaggttctttgctactacttgcttggctgaaactcacctgtggtcttgtttgactctataaaaacatttttttttagaaaaggatcttgtaagcgttcgtagggacagagaggaataagcacaatgggatactggtgaagaattacctgcaatggaggacgaggttgttggatccggtggtgaccaacaaactggctatagggattcatctgaggttggttcgacaccagattaggctgcggactttgtaaacgaattctggatgggtcaaaggtctgaatgtttggaaaagggtagcgcggtggtggatatgatgatggacctgttgagaattgagtccatgattaaatcttgtaatatcatatatgttatagtttgtatgttaagtcaacggacgtcatgtgactacgaaaggaggcgagtaagagacgtaacttgttggagaagttacaactgttaccaacgtagagtagttatgtgaacatgtatataagagtgtgtcttgtcttaataaaagaactaacaagtttcagttcaagaaaacattttctgttttgttcttttgtcttctctaaggagaagagacattgtctcttgctctgtttcttcattctctctaaataaatcaacaggacctacaccttccgccatatgagcctgcctagggaaaggtatgaatgcaggaggccgattcatacccatggccatgtggggcatgtactgttgttgtatattccccgcatacatcatcggtggaatcataacatgtcccattgagaacatctggcataaaaacctcgattcagatatgaaatctcactcatgacctaaagatccttaaatgtttaccctacaaaatttgggaagcaaagacctcaagaacagggctattaggccatctcatctaaactttataaatcttccaggaaatgaatctgcggacattcaaactgtttccatgttcaaactcacattctgtttttgaggacatacctgtatttggctctgtagagatttcacgtactctataacatcatccagcatggaagatctatcagtctgatcagagtagacacagaatcagaatcaacgttaaagttaaataacaactagttaattaaaaaagaaactgtaataacctttgtgcagcgaggaaggagttcttgcaaagccttcatcatctcgttaatcttttgtctccgtctctgtttaacaaaaaaaaaacaagttttaaaggagatgaaacagatagtccattattcaaactcagaatcttgaaattccaatggaagcataagaaccctttcggagagtttatgcattattgcagctcgtgacctcttactagacgtcgaatcacgagcttcttcagttccctgtacgccaagaaacagaaagatacaaattaagcttcaactgctaaactgcacgagtcaagtgactaacacgcgctgacatgtttgcgtaaagttaacctatatatgggagctctgactcacctggttttcgacatttgtttcctctctcgtttttctcttccgttcatcggtgatatccgtctccgtcgctggttgtctctgaaccggctctgtttcggccttgcacaacccccaagattgtgttcccgccgtctcaatcgccaccgcctttcccctcggaccaagaccaggaactgcaaaagtacgagatactccgccagtgactgttgctcgactctcggtgccgtgagtcgctggtattgattcagtggctgaagacaacagggtcgagttcgacggtacagcttcaacaccgccaagaaatatgttccctctttgcctcgagatattcataaaattctccgcccttctctcggccaaaatatgaccggtcggtctatccgccgccagaatgtactgagccctaggtggtggtggtggttctagggaggccaaactttgcgggtgagtcgaggctactccggagtaaagaagttgggagtagagataatcttggcgattaggctggtgaagccaagaagccatttcgtcttcttggataaagagactctgctgatggtacaggggaggcggaggctgcggtagaggaccatttccttctccgtccccgcttccgctgccccggagaatgagaggaggatcgcaagagggtgtttgtgtctggctacttgtaactacttggctgctcttccctaagagctccacgatatcatcttcacccctaaactcaaacaaaaccaaaaccactaaaatatacacctcatattggaataaacatgcaagtaagagagaaagaaattcgaaaatgaacttacatgatgtatttttctggtgagattagatcatgggataatataagcatcttcggtttccaagtcatcccttgatacaataaaaaaaattatgaacaaaaattctgatagaagtcgcccagaaactcatatggacatttgtgacttgtccactttcatcagaaaaaaataattgtgaatttgttaaaatgtcccttaaaagaaaaggaaactaaacatttgtcgtagccttttgactcgtttaaaccacaaagctccaagaaactgaatattttataatggtgttttggcctatagtggtgagttagtttcttcaactgattactttttctccgaattttgtgctaagataagctctgacctgaagtaaaacgtcctttagtgggatatactactacgagcctcctagagacgtcatcactcaccacgaaggctttttttgttgttattcttgtcttaatgtagtacatcaatggacatatctatgattttgtacgagcaaactggtacgtttgtttaaacaaaagcatccaaaaagaagaatgaggtaaacttcattcttaagcaaatctctctgagtgtagtacaacatcaataaacatttagatattggctctgcagtggttttcttttcgatttctttgaaaatgatagtagatgaaacaaaacaaaacaaaaattacaaaaaattgatatttccttgcttgctcccatatgtatgctcatgtggagccatcaaagacaccaaaaatggagtacgtaggctatgaatagtgacaaaagagttgatgccgagggtgatgatgtcattatgaatattgaaaacgtccacacttcagcaatgatattaaacgtaataaatatttctttcgacatggagtgatgttagccattcaaaaccttacggtttacgttatatcgtaggctcataatcttagaaaatataaacacttcaactgatatttgtgcgaagtatttataaagaaaatagagtgtaaaattgacaaagttttataaagccttcgtaagaaagaagtggcaactaaccacaaaattgaaacataacagaaaagacagagccgagacagagactccccattagcattagagagaaactaagaaaaccataatttggaaaaatagaatccttagttccttaccattgtttggcagactcgcgatattttatcatacgagaaaaactggaaatagattctgtaaaagattgcatccttaattatattctggagtctaaagccataatagtactaaggttcatggggttcatgtactcaaccgaaccagtcatgatttgttggacgatgagtcgggtggctttctcggtcgggtggaaagggtcccagaaagcataggcattgcggtcagagcataaagtcgacaatggggtgcaaacgccttgcccgttgtatgctccttgtccacaacatgctacttttgacgtcacaaaacctatgaaaatgtatcaaattaggtctaaaaatgaatcatgagacaaatttaccaattaagagtactcaccaaatctttggggattgttgatgaaatccgcattcgtgttaaaggcattagccccgatgaaaacatcagaaccaatctcacggttaagtccttgaagcatttgaactaaaagaggattgaagattgctgcagcctgttgcgcctcgggtgcacattctccattcacacttcccgatgaggcaagctccgctggtacgcaacccaaaggtcctgttcccgtcaccatcaccctccttgctcccaactcataaagactctgtatcacataagtagaagaacgtgataaatataactctataaacctaatgtgtaaacctaacgtgtaaacctaacgtgtaaaccaagaaaccatatatatataccgtcaggattttcttgtattcggagatgagaagctggctaaattcaccgagagatgattggcgtcttctagtagagatggggaagaagtagttgttgacgaaatcattgccgccgagagtcatgaggacgagagccccatttacaagctgttgcgttttgtctgaacctataatctcactcactctctcttgatactcttggaacagctcgaattgcctaccgatccttagtatgttcaactgcaataaattaccacacaaaaaaaagattagactggagtccaaaatagtttagacatttttcaactaaaaatatttatattttaaaatgaagctttactttggagtttaatcaatttttttttttttgaatgaatgtaaaattgtatacaccttagtcaaatttcatataaaaattaaacgcggtaaacgacttacaaattgaacgccagtatcgttgagaattccaatgccggcagaggcaaagttagctccgatcaatagcttctctccagtgagttcagggctaagaattggtaatgtaggctcagatccaatttgttcacctaaaaaaaccaccaagcaatatcaccaaaagatatataaagaaaaagagagaattaagtaactgaaaacgtgatcgtactgatgatgtcagggaggttcaagccgttggagaaacgaccggttggtcgaccagtcggataatcgattccatacggtggagaatcggcacgagcagtggtgactaagtaattgttattaccactgtccacgagtgagtcgccaaacacgaagaacgctctagccgcatttgtttgttgcggcataagaaaaagcgttacgcttaacgcgacggtcataataatccatgttaggagaaatgtggacatgatctagaaagcgaaaccttttgacttttggcgttgttttgtaatactatgaaatgttaaagaaaagattagtctcttgtttgttatatacactaatggaaaattgtattaatgatttgcttgtttttttggtgtatgtaataaatgttattacttatgtcgtcggtcgatctaatggtgagaaacaaggtgtcatatttaagaggaacaaaagtgaaatgtcaaaacttgtatatttattaatatatagaaatgattatcgtcgatacatattcttatatatgtcctttcaaacaagatcttattaattactatgctgtataattaaccataattaaacaagttgtgatcatcagggttttgcttatttcattttttgatcaagcaggattttgcttgtttcaacacagagaaacacaaattctttgaaataggatcgtaaaacaatcctatttcatctccagcagcaagctccttcaatctccataatgatccaatgtaatatgtatcagattcatgattatacccgaaggttacctcgtgctggctccctgtatcataatcgtcgatctttatctttatagagtcttttttcactctactaattatggattcgcccaaacttctcaaaatatgattctcgatatcgttgttattatcaaagtccaaccaaccatcacttttctctgttaagatcttccttatcttccacaaagatgttttgttatccatcactttttggtttatgttgatttctctgatggatattatgtaacatacacacatatatatatgggatataggaatttttagattaggcgtgggtaatcaaaaaaaagattttggatttaatattatccatcatgcatggattttgtttgacaaaaaaaaaatcatctttaattgaaaatatttttaaaaggacaacttaattgaaagtctaataaagttccaatttattcagttaattttataaattaaagattgataatccattttgatacttataaattttgttctgacatgtttcagcatattaaaaaggtatgatatatttatgtcttacaaaatgacttttagaatctgtaatatcttacaactttgctacttttagttatggactaattaaatagatatttatgtccttataaaagttgcactgaaatcataaaactcaaacatttgcctaaaaccaacaaattcaacaaaattttaatggtttagtggtacctagtttacttttgtggatatagtccaaagttcaaattcaactgcaatttcaattcgattccaaaatactcctattaatccgggtgtgaactcatgatttccttggttttcattttgttcagaaaaaaatgaaagtttgaagtaatcacccctaaatgtaccattcatttacgtgatacatggggaaaaacaacaaatacacatgacaaaatgacacctctgaatatggttttattggtaaaacagtatcgagagatctaagaatgctaggccgtccaattaaagagacagatttaaacattagtgtacccaaaaatcaataaataaaaacagagagagagaaagaggaaagcctaaaatgttgttggttagttatataagtggttgtctatctttttcagtcatctaacattcacatgcatacttaattctcatcatcatattcataccattatcatcatcacaatacaatcatcatgagctgtaccttttgcatcacttcaagtctcaaatatctctaacctgagtccccccatcacttgaacttgaacttctgaagcgggaagtctcttcacaatgagctttcctgaccctaagcccatttattcgaattctagcccatttagtttgtttggcctcatcaactatatcaaaattttgaactattacattaatgataatgaaaattttcgttaattaataaattttcgttaatgattaattagtaagcttcggaatatatcctatctgtcaaaacaacatttttctgttttgtccgaaatcatcaaagactcttccttcggcgatcgctgctcagaagtttgatttcgatatcaagaatcgtgatagaaaaaatgcgacacaattgttgccatgtctcgttcgcttcgattctcaagatccttaattttctccaagctttcatcggtatatcaatcataatctactcgatttggatgctcgatcaatacaatcatcacgttcccgttgaccctcctccgtctcagcctccggcagcttcatcaccggattcttcttattccttctctaattcaataattgagatcaacagtgtttctgattctttgaagaatccgatcgatttcgtatcgggtatcgttctcgggtctggtggtggagattcgggtttcaatctccgttctttagatcttcctgctccatggtattgaaaaagtttccatttttatggttttcgattcaaatctatgcctagtttgactaatcttgttgaaaaaggacaaagcgttaagctaagacactgtttgatgtttgaaggaatgttccaatgaattgatttggtttggtttcaaattcaatgtaggtttatctactgtttcatggcgattgggattttggtctgcattgtcactatcattggtttcattgcagctgaagctatcaatggatgttgcttgtgtttcgtatccttttatatatagactgcacctatatgtttctgttaatactattcagttgtgatgtttaatccttgataggtcttagtattcaattctcaaaactcttttaatcattatcgaagcagctctagtgggattcatagtgattgaccgtcactgggagaaggtgaggtgtttttttttttacagttgaagcttgtgtcttgtgtgttctgtttaacggtctggacttttgtttctgtaggatcttccttatgatccaactggagaactcaatagtcttcgagctttcatcgaagaaaacatcgatatttgcaaatgggtcggaattgttgtggtagccatccaggtaactaactaactgattttggtgcctttgagttcattcatgattcactcagtattcatatgtgagtatgtgtttcagttactgtcattgctactggctttggttttgagagctatggtttcacctcggcaatcagagcttgatgatgaagatgattttgagaatccgatgagtagagcacgagacaatcttcttggtccacaggcaaaccagacatcttctggatcaagcaatattgacaactggaggtcccgaatcagagagaaggtaaaaaaaactaagtttcttggtcgtttgattttgaacttagtaccaaagatttaagcttgtgaattgatttgtcattatattcttgttcttctacagtacggattgatcaacagtcagagccacactccatcagcttaactcaaaagactgagttcttgtgtctggaattatcagtactttggtttggttcttctctctgttaactttcgagtgtgcatagatatttacacatttatgttatcgtttgatacttttttcgaaactctgtttagatcgcaacatagctttcattttggtgtacaaaagagttacgagatttgtgtttgaaatgggaacaactgcttattgctctgcttcaacaatggctacacagcattctgttttctctctcaatcattacaaaaaaatcgagacacaaatcttcccatagaccaaaaaaaaatgaacttagcactatcttacatttttattgaacgtagtatatatattgctcctgtctcatctcatcgtgtaagatcgataacggcttcctctactagctcttgcaacaatctcttttcaatttcaatcccaaagtcatctatttcaacttgcaagctatgagtccatgtcctcccgactatctcatctttcactagactctctgcagccaaactgttggcgtccatgtcttctcctgagtcacgcttgctaggctcatctgaaacccagtcctttaactgagcccacacatgctccaccaggtcgaaatgcagagaaccattacctgtgcgtgtagtcgttgtttctgaaacgatggagttgatgcggtcgaaaatgagcttacgagttgatcgttgttgtctgcgtttgccttcgtggatgaactccttgatgttgttgttatccgggttggtgtatttgtctctgagtgaagggtctaagggactgtttggcatgtgccatcgtgacatgatggggtcatgagagactatgcaaccactgctgaaacctgcagctgtcaagatcatttctatgaagagatgccagtcttcctcctcatggactcccattgcgggtttagctatgttgtcagtgcaagagtcatcatcccatgagaggagccgagcaattgacccgattggtggtgatttgtcgattagattagatttaagagacatttcgtctcctgttgagaatggaacattttggattagcgtaaaaggaatgttgggtaacaaaactctttgagaaagctaagcaagcagagaactaaccttgagatgaccaatgcttggttgacccagaacattctggaatgctggcacattcctcttcaaatggtggaaacaaaaccgaaattggacttggctggtcctggttttcacttgtattcccagtcgctaggggctttggtgtagtcacttcctcctgcaaatggatcaaaatggccgctgatttaacatgaatattcatccacctcgaatagattgaaaaaggtttagagaattggtgggatacctcgcctaggattatactttgctgttctgatgaaacaggagggagacaatcaataggaaacacacaatcttcgctggtttttccggtaagagtcacaggagaaggcgctgccaattgagacatactgctgcattgagatgcatctcttttctccttgcttgctttattattcttaaagaagaacaagtttgagactttccatgacgatttcaggcttcccgtcttagtcagctctcgtggagcctgtactttggaactccccagaacagatgtttctccgttgagtctaacgtcagagactgattttgaccttgcaagaatattcagagaatcacttgccatttccacttgactcagatcactagttatgcatgatgttgataccctcgttgctggtactatttcatagctcccttccccggattcagttgtcactttggtctctgtaagtgcaagcatttcccctaaggtgcttgaggttcttgaaacatgtttaagcggttgagttcttcccgatactgacatcaacgcccatctttcagaaagtcgcttcttcgcctctctgcagacagatgactctggagaaaatgaagctctgctgaaagaggaaggagagaaaagactgtcaaacctatttggacagtcccaagaatgcctagatgctggtgacatgatctcagaatcgctaagatttcccactaaatcttcgttatcagacttattaaaagaactgtcatcaccgatatagccattggataggacagaagaagactgagtctcgttcctgtggtgacccatcagattttcgcgcacttgacgagtaatttcctttgcaacttctttagtctcaacatcttcaggctcatcaaaatatcccctactgtgtaaaccccttggagaggattgggatgatgatacagccttaatatctagagactttcctagactaggcttcaagacgacaattcgggttggctgtacagtgtgttcttcggttccccggttgacataaggtgacgggtaacccagatcacggttcccccatccagtctcttgacttgatgaagccaatttcttaacctgcttgttcctcctcccttgaaccacatatttttcagtttcaccagcctttgaaggtctcaatactgtgatccgcttcgcctctgaatgaggaggaacatggtgaaagtcagaaagattctgctgagagaaagaatttgattcctggagaaattgaacaaacaaatccttgttcgagcttaacacttcaagtgcatcttggaactctttggattggtgaagactatcatctgttacaaggcgttttgcttctgagaacttttgacgaacaagagccatttgtttctcagtcgtactttcatcatatcttccttttctaggcgagcaatcccttgagcgactcaccttctgaggtgactgccatgtttcatacacatctttaaattccctactgaaatcctgatacttttgaacctcattatctgtagaagtcatcgaatgattcagagaagagtgtgaattgcttctggatttgcttcgctgtgtagcagtctcctgatgcgtctggggaagtgtttccaaacccatcaacttagcaaccacattagttgggctctgtttatgttcaacttcttttgacatttctcgagcaatgagtttcttcatcggtgtaccacttagtttgctagaagcacttctcctcaaatcagacataatctgtgcaaacagtgcaggcaatagacttcagcttctgaatattaaaatcgctgttgctagcatgcatactatttctaattatttaaccaaacgtaccaattcagcttctgaatggcctttataagaagggcctggcattcgagtcacatcagatcgacttcttgacagagaggatcctgccatgaaactacctcgtgtcaataacacaggtggatactaggacatcctactcagttcagaaacataacagaaagcttcgactagtgaacaaagcaattacagagggaactagtgattaccatcaagatgtggtttatctgtaagcaacttgttcccattaacagcaattcctagatcaaataggttaaccatcttccctaagcatcctggaactggactttcaatcttttgagcctttctgcctcggagttcattcattatggtccctgcagtttcacagctatttagttattatctgaggtgacacgaaactaacaagcaaagattcctaatgaagaaactttccagctctgcaagcttcaaaatttaaacctaaaagatccaggaaaagtgaagagagagtagaagaagagaatatttctagcagcaaagaggaacaggacaagcataacaaaacaagaactttgtaaggaaaaaaagaaaggagaataagattctgtaatcagagggacactttatagtgactgaacaaaagataagatgaaccagttaccattttttcacatgacctatcacaatcaagccagtcactttttatgctctgaagtctgaacacaaactccttgtgaaaattacaaatcaaaattgactcacccttaataataagaccccctcaaattccgagattgatgataggaagaaacaatcaacaggcactgtggatctgcctacattaaccagattccagcatcagtgatacaacactcctctagtaagtctatctatgaactcaaatttgtttcccccaaaaagaagaaacctttagtaataaatgtcacatctttaacaaaaacaagcaaattgacaaagagaagagtaaatgaatccgaccaaaattagctcaatacaatcacaattgtaaggaaacagtaaaagcaaaagcagagaaagagagagagagaaagggtaaaaagagggatcagaatctaattgaagtaagaacagtgaaaagcaaacaaagaaatcgaaacgagaaaataggtaaaaagcatcggaaagtgagatcagagctaaatgattcagacattttgtggcttttttactcgggggaagagagagagagagagagagagagacctgtaacagttaagagctgagcttagctagagtagatacatcggaaactccgccggaaaaagatgcccgccggagataaagtaagccaaatctctctctttctctcacgcgttcacaccgactgagaatggcgtcggaagcgaaatggattttgaggaaaaaagagtctttttttgttaggggaaactctctcaggtacagacaaaacaaaccgagaaggagagaggaagccaaaagaaaatggaggaagttgctctcttctcttctcttctcttctccactctctttcttcctcttttgtgttctctcaattattcattttcttttgtttccaatatctcttcttttatctcttttgtttttattatctatatatataaatattggaactgaaataatataaatttaattaagaaaccacattcggaaaatcaaatttattcattggtttttgtaaaaaataaaaaaaaattaatactatattggttggtactatatagtctaaattttaaattttttttgtggtaaaaataataatatatatagtcaatattgtgtataattaacaaataaaagtttaataatagttggttggtacttatgtatgaatgatggcaaaagacgtatggaacatcaaaacgattcgcaagttttgtcaaggaaaggaaaatagaaaagagatgtgatgcttaaacttcaatgattagtgtgctaaaagcaaaagaaatcagattatgatcatatacttcatctctttctatttttggttgcacggatagatacgctcaacttcacattcacaatgaatgctttcatgaaaatttggtatgttacaacaaccatatcctttgtttctgctactttcacaacaattactactaagtctactatagtagatatatcagtacatttttatttatatatatacattttcattttaatgcaaacaaaacaattactatatgtttcccactgacgagtaaaaaacttaattagattcacagagagcaaataaatataacttgtccttctaatgtatggccgagtgggcaatggcgaatgatgatccatttttgtgttgtcaaattatcgttggttatgaatatcggtttccccatgcaatttattgtttcgtatactaaattctttaatatgttaccaagaacgtgaaatcgaaatcgagataatgtgtaacacataggcaagccatgtaaattatgcagtcataaaagagacgatacgctaaccaagaatcaatatatggtttcgagccttcgattattagaaagataacgaccacactactattggttctacatgttttatgtacataaaatcaaatcgggaccaaataaaagaaaaactgaaatggaccagccaatataatgtatatattctttaatatcagttgataaaaaaaataacaggaaagagcaataaaaacatagagccatgacattatgtcttcatcattatcagccttaaacgataacaaaattataaagctctagaattcaccaaatatacccaattgaatttctactagtacctaaaatcatagttacgagggctaatggacttctcataagacttatcttacgcatcatttggatcctctaatatttcgcacactattaagtccctagacgaatcgaaccaaggaaatgcgtaattacctttttaagaagaattaatgcacctaacggatattgccgctcaacatagagtggttaatgttcttttttgccaacctgtatttccatttactgaagaaataaatttgacacaactaaatctttgaaaattacaatattttataaagatttacagtttttgggttttataaaataaataagatttgacaaagatagttatgaaaagaaggatgaaatacggatgtcttttcatgaagatttataaagagtactaataacttcatatcttatgattagaaatctaactttgaggcccttgtgtaccttcgaatatagctagtttatagtgacgggacccttagcataaccaaaatcactgacaagccatagcattccacgtggttaagtccatctatactctcattatcatcttccctccggttcgggttcacgatactggtttagcaactaaattatcaaactatcaccagtttcgtagaatttattcacactaaaaccaattatacgttaaatcattcgttagtcttgtaacttttgttattacttattaaacgccatggcgatgttgggtccactaaacagcgcagccaatcacataaataggggaacacgccagttagattgtatttttaataactgttgtccaaacgtgtaatctccaatattttatctgttccataatgctaatgacaaacagaatagaaaatgagagagctatagaagtcatatatacagatagatataattggactcagattctatgtatatagttgaagatataataaaagataaatctaaaataccatactttgaagaatcagagaagaaagaaaacagcatggccatttgttggcactaaataattagtttatggacacaagtaagacaataaactgtactgttatagtgttttgtagtcaaaagtgttccacacttcatgtgactacaccattacactcattacaataatcaatagaataccaaccaactctataatataacgtgttaaaaacatgaaggtgttaatatttaaataatagggcacgatgtttatatgcgttcttaagtttttctttcagtagttgtgtcttgtatatcgatatatatgtagtggtcttacaaagtaggtgtatgtatgaataaaacaatgttaacaatctaatcaaattattgtttactttggagtaaaacaagaaaaaaactcaggttgattatgattgaaaataggatcaaatgataatggataacgcatatatatgtgtatgagaatgagatatttgagaaattttattttcggtagaaatttgcacagaaacgtttagggaaaatgttatatgaaaaaatagttagaaaaaaaaatttagtgaaaattatttactttgtttgtgattatcttcattagatgtcatatataaatatggacatatccatgtttttctaaagtgttggcgctacatcaaccaataacacgttttattgtttgatctgtagtaattagtgagtagtaaacaacgaagcataaagcttcatctatttcatagtcgttggttgatcaattttttttaacaacacatttcaatgactagcgacttaaattgttaatcgctaaaagtaaggtttcaaattttgaattaacgattaattactaaaataagttgttgtcgtcaacaattacaaaatgaacacgattgctacaatatgttattgttatagatctttggcaactgcaaaacgaatataatttaatcacgtacgatacgactatgaaaaatcaaacttcatctaagatatatgttttggttttcattttaagattaattaaaacgagagtggttatgtattaaattgtttttaaatttataaagaaaaacaaaacattttttacatgtttcaagaaacacttaaatatttatccacaaaaaataaaataaaacaatgaatctttatttttcattcacaaaggaaatctgaaataagagtaacctaaaaaccacgtcaccacattatccttaagaatagatatgtaatgtacacgtggcagatctcaagtggagggaaacgattcgtttaacccaaaacatctcaaacaattcctcttttcttagccttacgaacatattactaccaacaaaacaatcaagaaccactctttcgtgtcgcaataacaataagaaagaaagaaaaagaaaaccagagatggcgatgacgacagcatctacggtatttgttctaccggccaatgtcacctcggtcgccggcgcttcgtcgtccaggagctccgtgtctttcttgccgatgagaaacgccggttctaggctcgtagtcagggcagccgaagatcctgctccggcttcctcttcttcaaaagattctccggcagctgccgctgctccggatggagctactgccaccaaacccaagccaccaccgattggtcctaagagagggtctaaggtcagctaacctaaaccgtcttaaattccattagcttgtatatatatacgcataagccaaagttacttatcgatggatgcattcatgtatatgagcaaattttatttgagttcttattggtaaatctgcagaatggtgaaatgacaaaatgaatctgccaattacacaacgtaactagctagctagtaggaatcgttaattgtgaacttgtaatttttgttcataatcagttaatcgctatgcaaaaattgtataattagtgacaaaaaattaaatttcaccacatcttatgttcataacatggttcaaatctaattgcatgtttatgtgtgtgtgacttgtaaccacatattttgttcataatcaatcgtttcttatcttgatataaattgttgggattcgtaggtcaagattctaaggagagaatcctattggttcaagaacgttggatcagttgttgccgttgatcaggtaacgcatttagtctccaatcaacgatctaacggtcgtatgaatatctttcaccatgccggttttgtttagtttcttgaccagggttataaattgtgcaggaccctaagactcgatacccggttgtggtccggttcgcaaaagtcaattacgccaacatatcgaccaacaactatgcattggatgaggtcgaagaagttgcagcttaaatgggagaattcaaaaactctgtgtattctataccggtttatccgtttgtaacttgacccaaaccgtatgtaccgcaaaagtttaccaattatttctcctcatctgaatctcgagccggttttcttattctttcacagaatgtgtttggaaaattcagttaaaagtctctttctactcatggttagctctcttaaccgtcttcatattcattctgaaaccggtacaatttcccttggtaaacaccttaaaaactaaacacaaacactttgcttctgaattcattcattcggactaaccacgaagtgaaaataataattttgaagtcaaaatcttttcataactatacattttataaaatttataggagactaaaaaacatatgactttatccctaagtattagagtatttacactctaccatccataccgtcaagaagaccggtccacattcccttaaccggaggaagctgtgcaacgaaggcttgccatggaggataacccactccacttgcccttacacgcccatccaaacgcagagacaaatacctaatatcaacaacaattccgtatcaccgattgcaaaacgcggtttaaatcgattgtctttacgcaaaaacactcatattcagctcaagaaccggtgcaatattcagtttaaaccggtttcagagcaaatgcaaagaactacttacactggagagtctgaggaaacattggcaagcttcttctgctcatttaaccacctgttcacgcaacaaaaaatatgaacactctcaaattcgattttttcaactcgggtttcactatctttaaggaaagattcttacttttcccattccgggacaaaaaccggagtcacccgccacagtttcttccttctctggctcatttcttcatccgcaatgtcagtttcatcaaactccaaaaccggtgaattcccatccgtagcataagccaccacaaccacacctctctccacgagcccttgtgtatactctttacttctcttaaacgcttcttcaataaactccgcaggaccagcacagatcacaagcctagcaacccctctcagatcacctacggagattaccttattgttctcttcgactctcattttgagtttgccaagattctcttccctcgagagcctagccatttgcgcgttcttggtcttgttttcgttgaagtataggaacgcaaagagagaagcagcaccaatgtcaactcccaaacccttaacgatctcaagaacttcacctgatctagccggattcgccagggcacctatgagcctagaagtggctattagtcctcctaatgaaccgcttgctataaaggcgaggtagaagaacatacggactgatctgaacggagacagaacctcactacggattctagcatcagcactgaaaccataaacagagataacttagctgtgacattacacaaggtgtgagataacattcttgcattcaaagttttaacctttcatcatgtcaatgagcataaacctaccaagtactaaaattgattcaacaacgacacagatagaacctaaaccataattcattcaaatctaaagacgaaccccaatttaataaggttagaagaagtcgaagtttacctgatttcggagggctcgtctgcggcaaaacacacggtgttgaaagacaaaggttgctgctttctagttattgtcaatctatggtttctatgagaaaaatcgagtctttctctgtgattatgacgggaaattctacgatgagagtatgattcttttgcctgataaagagcttgtttactaatatgacaatggtagatgtaagtttgagacgagaccagagtagccattggtctcgctagattctctgcaacttcccctgtttcagaagatgacatctcttttcagtttgggatcatttttcactctattgacctgtgatcctaaacttgccacgcttctctctgattttggattttctagaatatatattaggccacttttttccttctttatttatcagcctgggattggtaatatttggattactctgaaggcttgaaaactgtgaattcaagtggtgaaaaacaaagagagatcaacaattacatgatatgtatatgttatttattaactataattattgtattcaaatgaggtacaatgataataacaaaaatgagaaaactttccaagctccgtatgcaaaaatctccgaaccagtttcaacatctcctcaactctgaccgtttttaccgttggcttcagctaacatcagttccagatctcctttcctgttaagcttcactgtatctgtagcacaagaacaagaagataatgccaatagttgagtgaaacaatatccaaaactgaggcatctcacatttgagaagtagaagaaaccaaagaggtgagaagagaaggaggaaagtacctgtgcagccaccaatgtgcttgccacctgctcattaggacaaagattagacactgttatgactagctattaactgaaactatgttgttcacttctttgggacatctaaaggtttcatcttttgaagcaggtaggatatataaggaaaacagagtttcaatgaagatatgatcgatgtaaacggattaaactacttacatacgaaaacattaggaacagtgtgttgcccagtaagtctttccagtaccttctgcagttgtggcccttgtggacctgaaattaaccaaacatagtttagtcaaacagaactttagatagaacataacaaatcattctttgttgtccaaaatcaccaaacattttgacaattgcatcttcaactgttctcaaagagagagacacatttacttttatgatatatacaagtatggactagtgagaaacaaaagcaggttacaacaaatatcaaaggcaaacaagaatccccaaaatgtacattttcaacccaatggtccagaaagaaaagttaaagataaacatgtaaactcattcgaatctgaaaaactaaatcactcagaaggtaaacaagacttgcattctttcaacgagtctaaatgccacaacataaactagaatagtaatatgcatatgtaaccaaaatctaaaggttaaaggcaatactaatggatacttttaaaaactaacaagcattacctcatcatctatctaaagccatgatatagtattatcatgatcaaatcaattactcaagctaagctatggaaaaaaaagatagaaatgttaaggaaatgcaaacataccaagttgatccaattcaacaaccagtggctgaaccccaagtctcttgaacaatgtcttcacttcagtacagtatcttcaatacacaccaaacaccaacaaattatcaacagaaacattaagatctgaataacagtaaaaacgaaaatttacaaggatatttgataaacccattctccaattaagcaaaaagaaagaaataaaacaaatcctaattaaaactgataacgaaagagagtagtgaacatacgagcaccaagttttggagtaaataacgacagtgttctcagtcactgttttcctaatactctcttccattctcgatccaaaggacgaagaagaagacgatgcagccgaagaagaagaagtcatagctcgaacagaacatgactgctttagacatctcttgtaaggagatccgacatatatcagagagaaggaataagaagaacaagagactgaaggaatcggatctagagacgacgatacaagtttcaatgtgttaaatgctgtgactgccatggcgatttctgcgacagattcttggagcttcttcttcttcttcttctttgcgtgctatgctaatttgtctcgtgacgtgacttgtcctcttttcccatttttcttttattaaattaaaaagctaaattttcgtgaccaacaaaaaaaatctgaatttttgttattctaatacttaatgggcctatactattactaatgggcgttttcttctctgaaaagtattcgtggttctgggcctaataggctttataagacttgaaaacaaatcatatctcactcatcatgatatcatacaagatgagatgaaagatgaattattttgaagaaacatgttacgaatctcacataagaaatatcatgaaattaataataataactaagtaacataagtcaagccattcatttcaattgattttgaattgaaagctattaaacttactataaccattcaccaatgatatctaaattgcattgggtctatgatttgtttggcaagttttgtcattttacacttaaaggccatataacaaaattcgtgagaaatttatgatatcgaaaacaactcatccatggacctacgtttgataagatcatgtggggacttttgactagttgtaacgtcatgggttcgaattatttcattgtttctccaatttgtttttgtccatatcccaccaacattttcttcattcatttataagcccaaatctttgttgcattgacatacataaatatatgcacacatacatgtattaaatattatatacatgcaccacacaaaacataactcattttaattataaacaattatattataaaactgactaaaagaattggcaagtactctcatttgtacaagttcctagtgttgtctgtgtccatccatgcgtgtatgagtaaatactaacgattggtacaaatcaaacacttaagaaaattcagatattcgtatccaatctgtatccgagcgaatgatctaaatatctatttctttttaattattttaggcatttacatatgtggaatttcggaattcttctacacaactcaaaaataatgtattaagctagctagttaaggtttgtatttgcttacaaaatctaatgataagaaaaaatattgtgtaagaaattttacacagaaatatcaaatttctaaatactagaaacattataaatattatacataatcagaatgaatctctagccggattggaactaaaatgcccatactatatatatatatgtgtgtgtggggttgcaggtacataaaaagggatatagagatatgggtacagtagtgttccattcgaaactttaccatcccaatgattaaatccagtacattcgaattattttttctttacgtacatatttgagtatatataagaactaaaacttgataaactataaacaaattacattaaagaaaaaaaaaacttgatgagcttgtatagttagttacttgatagagaagtactagttcctacttttataacatacattgtctattatttatttgattacgtatctatcctaaactttggacttggaaaattgacttatacgtaaatgaaatctttgaaaattgtttgtggtaaatacaagtgtttgttggtttcttctttcttgtgtttagtgtagaggaatatattttttttcttttcacgagaggtagttcatctaacagacataggcatgtgaaaggaacaaaccctagtttttgcagactttggtaatgtgtaagatgaacaatgtggacccttgaacatgagtgatttctccactgcagaatttgtgaccattcgcatgtgttacccatttactctttgtcactaatatcttcaaagcagctctcaaatcattttgacccatttatatatactaattaatcaaaagtagattcaaataagacctaaatctaactctcacgataacgattttcgataaaaatttttaatccaaaaagtaattattttttcggatataatcaattttttgaggtattttttgggttaatctgatagtcaaagtagaccgtattttatttgaaaaacaataagaatttggtcgaaatatgtaaaattggtgtgattgacaacttttaaatcaaagtcgtatgaaatcttgttacgcaatttcgtaaaaaagaaaagtaaatggcactgtaaatgtatattgacgcatatctacctatgtgatagatttctagctagctaaatattcacaaccagaccacataactagaatccaagatgatgcctatctagctaggatttttgccaaggtgatgaaaatagattgagaataagtgtgaatgtgagatgacaagtgacaagtatggcaaaaacaaagaagaaagcaaaaagataatggtcactcaaattcaacatctcaccttgtagtttctaaataggtaacatgcggtgagggtacatgaggctaaatgatcactcctccatgggttttgaaatagacttttcacggtgtatacaagcgttatagtagatatatagtcataatcatcagaagttctacttccaagatattatagacatgtccagttcaagtactttggtggaacttaaaatttactatttatggagctagctatctatttttcttttcttttatcaatatatcctcactaaaatatgattttgacgctactagaagacattctaatcccgtatatgactcaacacctatgtaaatgtatcgataatttcatttgaaatttttctattaattcaaatctgatatgtttagtttaaattgataaaaaatcaagtttgtatcattttatagtatgaaatttaaactattaaacgcctaaaatatttgaagttttgtgaatttttgtatctatttagttcaaaatttgccgattttttttacgtgtggtctcatcgatcatatatttttttaaaaaaaatacactagaaattgagagaattaatatagaaatgatatacattatatttaacattttttaccaaacaaaatacattatatttaacatgatatattttccttctatttttcatagaaactagaaagggataatgttttcgtagaataaaacaggataacaaataccagcaagaaaaatataagaattttttaaaaatttgaattattatcaattctacatatcaataataaataataatcataaatgtacaaaatgctgtggtcgaaattggttttgaactgctggctttatcctttgacgttggacataggccgatctacatttgatgtgacattgtaagatctctttaattaatggatttaaatctcttcattggacccaacacatgtgggttttaattgtcatcgcaaaatttattcacttttctcttttgtttttttcccctcagaacataactacatatacaagtgtagtacatactattttttcttccccgtggttacgaatgtcgaccaaatattttctccaagttttgaatagttgtttttgctttgacattgttgataataacaagctttaaactatcattattatgttttattttccaaatttattactaaataaaaaataagatacactaaaatagtaccatgaatagatggtttggaaatagtcattcaaaatatttccaaggaataatattcttttataatgctctacgttttagctagataagatacactaattattcgatgataaatatgaatacgaatcagatccaccaggttaaaagacagtgcatgttgtgaattagtaactggttctaatttagccatttcgctgttttattggttgacgtaggaaattagttctatataatgcatatgattagcaacgacaacaatgtatagtttattttagaggggatcaaattgcataatgcatggttgaagacgcttttagatgagtccaatcttggatcgaagaaaacttaactacctagaaagattaatgtaccgatttagttttccgtgcaaagtggaacgatgcatgaaccacgacactaataatttcattaatgactcaaatcgaatgtaaagtgggatttaattatttgttctgttaattaggtttaatcgcctaattaattaatttcaattcacacaaaacacctagatatcacatgtatttgaagatcatctttaaacttctgtttagacaaatttagttacatagttttcattaatgaagttgttttttccgtcaacaacatatacatttcaccggaattgaaaattattttgatagatatatcagtcaacgaagaagctcttaattttaaagaattcaatactataatgattacaaattcaataatttcacaaattttagaataaaatgaagctttattaggttaaatagtgattatgtgtataattgtgagttgtgacgaccttttttgtgagctttcaaatattttgctctgctcttgggttgttgatccgagagtttaaaagagttgtcaatggaccataaaaaatcactacgagagtaaaagttaatttcattaatccaacaacattgaaagttaatatgtctgaaattctcacaaaattcataatcaaatcaattattttcaaagtttttcctgtgcacacaaaatttttgaatatatatatatatatatatggctttatgtcatagtataatttcgcatgcttttatatatttatacttattttgcaattccttaagcacctaaaaaaggatttgttcaacagggccaaaacaacaacgaagaattaagtgtagtagaactcgaatccgcaactccacaatgaatccaagtatcgaagtttcattcaaactactgtctaaaaaacatggtgatttgttcagtaagtggaaagtaagagaggttggcaagactatagaaagatggtaaattgaaatcaaaatatatttggcttaaaaaaaaatagaaaagtgtatacaatatagatgttaacataaacttgtacaaaaaaatcaaagaacccacccccaaaaaataattgttaaaaatgtatgtaaaaaaaaagattgtaaaaaagtagaaaacaaaaggccacatcttcctctgtttacacaaaacgcccaaaacactaagtggaggaggtaacaaaaaaacacgcacaacaccctttgattcgctttgggtcttcaggagagggctcttctcttttgtcagtgatctctgtcctaaaactctaatcttttttttcctaaaaattagaactgttgagagatacaccttcgaagagaaccccttgagcgtttcgtgggttgttttgtttcaagttgccaaacagagcctatgtcttgtgcgatcttaaccgcgtccattgacgcacctgagagccctttcctcgtaaacccaaccgcatacaatcctgtccttcctttccaaccattgttgtcagctactgtctttgggaaaccattctttgcaaagaactcattctcttgtagccaatatgggacgttgctgcggtaaccagtagctagaacaactgagtctacgtctagttgttctccattgacaagttcgactttgtttccgttaaaccttttgatccctggaaccacgttgatctttcctaaccggatcttctctatagctccgatgtcaagcaccggtgtcttgcctttcacgctttttagctccattggacccatctctggtcgtttcaaaccgtatttctcgatgtttccaagaaccatccaacttaaaaccaacaatatcttgtcgactaaccatagaggaaaccatcttaacatcttcattgcaagctcaaacgttgatttacccattacttccctcggcatcacgtgaagagagcttctcacgaccatggaaggcttagcgaaatggtttgctaggtcaagagaaacttccatgccggagtttccacaaccaacgacgagaacttttttcccggcgaatttctcgccggacttgtaatcacaagcgtgaatcacctcaccggaaaactcagaaagaccatcaatctccggcatcactctctccgcattttctcccgtagccaccacaagccaccggcaaatatactcgacctcggtctgagtcgactcactcttcgacacggtcttgactcgccacaagccactggtctcatcgaaccgagcagtctgcacacactcgttgaacttagggttgatctcgaaccgggtagcgtaagactcaaggtagtcgatgaactgacgcttcgtcgggtactccgggaagtcctcagggaagggcattttcggtaattgacaaaactgcttaggaaggtgaagcttgagacgatcgtaagtacgtttttgccatagagaagcaatacaatctgctctctcgagaacaacgaaaggaacgttttgttcatggagacaagccgccgtcgctaaccccgacggtccagctccgacgatgaccggtccgttgacccaaatgcaccggttattagttaaatcctgatcttgatccatcaaacgaaacatattctccattctttttttataagtttctttaataagtattgaaagtaagagaatttgaaagttttagtagagagagagagagagagaatcaatggaagttgtattggaaatggttttgaatttggaatgaatatttgtttggaggttacaatgctttatatagaagaagagatcccatgtggcgttgaatatttttccactcgacgatattttattttactcatataatataattataataatcatgagcttctgatatttattttaaataataataacagagtattttgtgagtatgattgcttagagttgtagtaattttttattttaaaaagctaatggggtttgtgacggttgagcactagtaataaacagtgataatgcttgacgacgaagtaataatattacgtgtattgggaaatacaaatttttctaccgaccatttttgtgtgttactatagtaattaagaaataaatgttttggttagagaagggaagtgatggaattagggagcaacgatggtgattgttgaagaagggtgattctttgtgggaccaacgagaggaagccacgtggggaagaaaaagatgacgtggaatggaagccacgtggagaggatgaggaaggtaagctgtgaaaattgtgtggaaccaaatgcagaattccacatcaaacccattcccttcaattaagcttctccactattattattttcttggtcccgccatctccacattttttcattttcttttcaaatagtatgaaaatccaatttttaggtacggaaaatgtgatttataataacatatccttatagtttctgtgttatattattatattaaagacaaatctcatatctttttttcagtttgttattgtacttccaactaaaatcatcagtttttttaatgatttttcgttaaaatatctctaaagacactaaattagtgcgtttgaatacacacaacagaaccacaatttttagtatttttttgtttgtattagtacaatagttatgtcattatcccgatttaaacatgcataatatatattgttataaaaaaatacatgttgattgtattaattttcaatatttttgattataacagtaaattggtttttaaatttccttttttgaaaaatatatttttattagttgataaatctgatatttttagcaaaaggaaaagataatgctgcacttttattacttttttttggtagacgctgcacttttattaccataatgtatatttttctctcggattcattttttctggtttcctcaatcaattttcaaagtttaattattaaaaatatacttttccatgttcaaaaatcaaaactctctaacgaaatttgatggtcttttattgggagttgtccaatataaaaattcaatggactagttaatattttctactaagagcttttgtttttggtaattttttctactaaaatttattattatagtagtctcattattgattaacttatgatagtctaatggtttaaaatgttattttagagttgacagactagttcaaattttgtttctctgcgatttcaatcatggatgatcatctagacactttaaatggaaaatccatatattaacaccttgcttcttgtttactcctaatatcaacctaaagaagcatctaaattaatgtgttcatatctaaagttaaattaggcaatagaaccatcaaaataaaatatgtgataggtatatgattaaggaaggcttttattagctttaataaagtagaaaataacacgattttagcttttgtaaactagctaggctatgctagccaagtgatggtgactaacttggctagaatgataaagatctttttgctcttcattggtacttgaaatcacaattgtaaagtgcattttttgaaagtaaacaaactaaaagcgactcgtattggtggctatgagttaagtttttgagtttgccaaaagaaaatttctttattatattagagaaaatattatagaggatcccaccaaaacccactagaagggattgtgggaagaagaaacctaaaattagagatgtaaagccatgtgcatggaaccttggtttccatggagttttctcttcttttcatgtcataacattttggaagctttgagtttggcatatctatgtatacacaatcactaatatatatgtataggtgtatagtatgtataggtttatgcttaaaaaaagatatacactcatttaatgttcttagcttaatcggctagaattttgtatcgttatcatatcggattttaaatctcgtttggagaagagattcattcttattaaactcatcatgatccttggtccgaaaaaatgtgaaatcaaatagaacttcacggcacaaaaaaatggattcacctttttatgttgaatattaagcactttgggatatgggttgggttactagaaaagcttattaggtatgaatcaatgtattatcatcgtgcatgagtcacgaccacttatagttaataactttttgtttttgtttttaatcacgataaacgagatgtaccaaactctttattataattattacaatatcaatgtgttatactcgatagtaaccatagattcagaaagccttaatttatgtgatagagagagctaaagagtggacgatcaattctctcacgaatgtcgatccctttattgtacgtttttgtatacttatttttggtttttgtcgttggagttttgtaatgacttcgcgttatttcataggccagctatatatatttctccttttattttctatgttctactttgatttagagaaataaagtaaaaaacactaggagtattaataaaaaagacatacacatatattatacatattatataaactcatatattcaggctgttaaaagaaaaactcaaacattcaatatgattgtattcatgcatttcatcgtggtagaaccttatattcatgcatttcatcgtggtagaaccttatatatgcgttggtgagcagaacctttgtttttctactcgaaacaatgatctttacctaagatcgcaacaactgagtcatgcgtgtatataaggttaaacatatattaacaaattaaagcaaagtattagcataaataaatatgaaaacgataatcaagtatatggatagtcacgcgtaaagagaaagagagaaagatgaaatcattgggatacgagaacgaatcgttcatcacaattaggcgtaaagtgaatatgcagctcatccgcagaaagtttttaatttaacttaattattatttttaatattaagaaccaattaatatatatatatatatatatataaccattatactaatgatttatacatttctatcgtttcctacagatggcggtgcactctatctcaaagtattactatattatggtgtaactttacggttggtacgtatcaattaagttattcaagaatactcctttacaatttagttcacttttttttttagttagttaactcttttttttgtaatgaaagttgtctttaattcatgtttattaaatatttataagaacacttatctacttctttttcataacaaatagtatcagataaaaacttacaatcatattttatatagcaaaatctcaaaattatgacttctttaacgagtttacaattatatattttttcttattgattttaaaatccatttgagactgatttcttaatagttgaaataaacaaatacaattatcccccacattgataatggttaagagccaagtatacatatatatgaacatgaaatttgttcaagttagttagccacataatctagtgtaatggttaacaaaacataatctaatggtttgtattaatgttatggatatgtcattactcagtactcatgaaccatatttaaatttatataatacatgttgttgattaaataaaacaaattgtaggacgttttccctcaattaacagaattatgatcttattcttttataatcattgtgattgtgtggtgtttaatttgtcaatctgtattttatctttccatactgcttctgaccaacaatgattaaaataagagaatatttgcactgcttataaaataaatacacgtatattcttacaaaaataaaagaaaaacaaatgtgtattttatcaccaatgcaaaaaattaatttaggattacgctcagagcatgattgtaaagggatgccatttccgagattataacagctttttccgatttaacaattgatttgtaatgataaaaggactctttatattattaatcatctatttctttttacttgttaaataaataaataaattatattctatacgtttgctttaaagcaattagcaactatcagttcattagaccgcattaagtaagttccttggaatcatcttcgagaaaatatctcatatgattttgattggtcacataatgtactatagaaaataacacaattgctcgctattcatgagttactattataatcacatttttctttctttctgaaaattaaagataatagcaaaatgagtagtggaataaaagtatgagacacacaaaattatttgtttgacgatgaaaatataataatagtattactttctttgttgatcgatacaagataattagcattgctcaagaagagtacaaataagaatatttctatttatatgaaaaacgttcaaaagaatatgaaaataatcatagaggaaggaataagagacgacgaaaaaagaaaaaaagaaaaaggaataagagatctgaggaatctataggagccaaataataatattaattaattcatttcattatacacgaaaaatgattgggaatttagaactccatagattttccaagatcttgtgaaactaactcctcccatacattactcagatctgactagcactatacctaatatgcatatatacattatacaattagtggtgtaaataatggaacacataactttaagatcgaatatatggtcgctttgttttatatatttctctagattgtgataaatatatggattttatttacatagttgtatagtttcgtggagagagttttcaagacaggaaatcttaataaagattataggcacaaaaaccttagaaaatagggattttggttttgtcaagacaagaaaaaataacattatgacagttatgtttttaataaatacaattggtaccatgtttctagattttattgtttctatttatatatgtgtcaagtagaaggagcagatctcaataggcaatcgttttgtaacatttgacagcttaattggtctgaaagttttgatctttagtgaactgttagagattatgattgatatcttcggtagttaagcctcaatgcctcatgtgtctggttataggataatttatgctgaccaaaatagcttcatcaaagtaataaaaaaggaactatattcttataaacaaaaagaaatagtttgtaacgactggaacatatcaatgttcgatcaaacatatcttttgaacatgagtaggggtgttcttatgaaccagaacatatgagctgatgatccgattcgattgcttggagaatttgaaggttagcttgagattttttttcatatatgctatatgtatttatctcaatcatgaccaacatataattagttgaattagagttaaagactgttagtctatcatattgcaaaaaaaaaaagtctgatcactcgatcatataactctctttcctatgtaagaaaaaatataggttataactcagtaatgatattagtacataattgatatgtaatcttataggtatggtatgctcaaagtagttgaaacattttataacaaaaaagtaaacctaattgaaatatatggagttattgggtagaagattcaagatataaatagtgtgcgtcataccaatatcctcgaagttgtcacatgctatagaatataatttcttaataaactagcaattaacaaaatcataataattatacaaactatttgtcgcaccaattatcacactctttttataattaaaacacatgaaaaagattcttgcctacgtcgccgattgtcaacaagaaaatcatcaccacaaaactataaaacttgttttcctaaagaacaaatatattcatatgtactcacacaaaattaacattgttctattttaatctctgtttttaaaaaaaatattgactataaattgagtgacacgtctaaagatgagcgattaatgtttcttataataaacccatgacactttaaacttagaaaatatatcgatcgaatgtctgaaactacatcgatcattgagaacgataagttagcaaatttatgcaatcaatatggaattaaacagaattttattttaacaaaaggaattaaatagaatttaaccttatcttgacagggccattgcacctggcgcaaccgaaggtttttcatgtggcaaccaaggttcatattttattagactctgtgtttgatataattaattaaagtactactatatttttgttgaaagaataaaaaggttatgaaaaaacttgaaactaggtgccgcccaacttcgaatgaagagacataaatcaacaaactccgaacccaagtgtggtcctggtttttattatatttagctgtaaaccggaatttaagttaaaaaccgaaagctggaccaatgcattacttcattttttggtttgattcaaatatggattcaacacattaatcaaatgtagcatctaactattgttgcataccctatattatctatcaaaaaatgtatatttacatatgataacttctcatatgaagaaaatgcaaaacattaatcttcagtactatctaaaaactagtatgattaatttttggtgaaaccaagaaagataaaaagtagtttgatttacataagagattatttaaataatggaaacatgtggttagacttaatgagacgtggtggatggtgattaacttcaggccatggaagagttttcttgcatggtacatgacttgtatccacaattccacatgctgtacacataacattatttgtatatattaatatattttataaaataaaactaagtgtggtcagatgggtatcaagtatcaaccatgttcttaaactcccatattatggtaaccaactaatgattatatatatatttttaataatgtattcacttaattactagctactcagtactcatgcagattactttagaattttgatcattttttataccatatttcggctgtatgctctcttattatccaatattgttttgggatgacgattacatctttatttgtattttacatgttagaattaaacttatataagaaatgtctcgtgagacgcaagacaagttttttcaaaaacaaagtttacgtgaaatgaacaattaaattgagctaatttaagtcatttttttttgtttggctattttacgacagcatgtatcagagaaatttaagtcaaaaaaaagtttacggtatcatttgtggtttttaatcgtttttttttttgcttttttatctacggatgatatgactatttatcaaccgaaaaaatattaaaatgagtatactcatatacattacaaaagccgagagacttaaatttcagtttctattatcgtttcacaaggattttatatcaagatattattgcggctctagagataattatgtctaagaaaggaatattcttttcattatgcattgattttataatcgttcgagaacatacgtaacactaacaattgcggatggacatgaaccgaatgaaactgaaaactgtttcttaaaaaattatttatttggctctattagttagagaatcgagatgaagttttgtaacgtcaaaaaaaattcgacgtccaaaaaggataatgcatgaacattcatgaagagccacgtcctttcacccttagatcaacccttgagttgctctagggacatttgtttacttcactaatctcattttgttagttttttaattagaaaaatgaattgttatatggatttaatcaaacgataatgtgccacatgcatattcttcgtattcgtattatcgtatactatacgtcccccgcgtaatggtatttctttttatcacgtgattctgcatgactgcatttgctatatataactctgtcagtatttttttaaaaaaccaacaaaaaaactatgtaagtatttataaactatatgttattatcgaaccttgcaagatttacgtaagtagttcatcggtagatcgtccttaactaaacatatattaaatctgatttgaaaaagacaattaatgaaaaagtctatctgattatgcccgtaactaaaagttggacatgtggggaaaaaaatttggactttccataactagaaactcaaatttgttacgtttcttttcttgttagaaaatgtccatgcaagtcatagggagcaaaataaattaataactaaataaatattttcaaacagaacattaagcattccaaaaccatattttatcgtttggttggcgaaccgacttacgaaatgcgatacttatttttgggattgacagcttttttgtggcgacgcatgaatagggatgacaattcttttctcctttgtcaataaatagcattatagcactattggtatatataatttcaaaataaatgcatgacacaagttgtagctaggtggtcaaattgtccgaaccataattgtattattttgttatatagaccgtttttctctaaatctcctaaccgccacaacgttgtagttttgactctaaagaatattcaatgattcaagtatgaatatgtaaatatattcgtagagtcaggtgataaactaaacaacagaagcttaaagtcaacaaatattttattcatcttaatatattccttacacttgatctatcaattgaacccgcgtattattaatgaaattccgacagaatttttaattttttaatttttcttttaataatcgttgcaacttaaaagtcaactaatatttattatactgggagaagattggtccatattttgagtaacgaacattgattatcctttttttttgtaaaaaaacattgattatccttatagaagaaaaaacaaaaatgtaaacttgaaatgtaccacgaccacgagggagatggtgttaacgtaccatatcgcaagaaaaaatattacaaaggttttctttctatggtccagagctctggttagaaaaatcaatatggtcctggaaagatccaagtggactcatgcattttgaataatcaaatatggtattgcattacaactgtgagtctgtgacgtaaattttgtttgagatacaaattctattttattttttttgggctaccaaaatttggtttgaaacgtataatttggtcggtttcattactatacgaggaagtatactaatttcgttgaaatatatggaataaaacgttattctgttttttttttgttaaacgtaattcagttacacgtaagaaacttatatttgtcattaatctctatgtataattaaggttgctgaaattttaaatttgacccacaatgaagtttttataaaccatgttacatgtacatgcatatatattaaaacttgagataaagatatttatggacaacatataaaacttagttgtcaaatctaaaaccggattgttgacaaaaaataataatacaaaacctgattgttaataatacttgggattgaaaaaaacaaaaacaaatcaagcccaaaacttcgtggagatgggttcggtcaaagtgaagtgcttaatggagatcctctactactcgaagtaatttgttcgattaaatagttcgatttttttttttttttagcctttgtgaattgtaaatgacacatgcaagagttttcttaactcttatgattgtatgtggtatttgatattaaatttgtgtaacttcatataaaatgtaattgtgcgagaaaagaagaagaattaaaacacgaacacatttgacttaaaaagcaaaaaagaaaacaattgttgtgatacgttgtgaagagcaaaatgagttccgaaaccacaaacattatcgcatggagcatcatcttcttgttgggttttgtatcatggcggattagctttatattccgaaagaatgacaattgtggttgttgtgctgatgtttaggtgagttaataatttcttttttggatttcaagattaatataattaggaatttaggatatgacgtaatatagcaatgcatttgaagatacaggtactcgattttttttccttatttgcgtgggtctcagggtcaatgaatacataagtaatgatttcgaagacacaaatatgatgatggatgtgtgtacgtagatgaggctgtgaagataaaacatttataaataacaaaatagtgtttgtgaattttaatatcacattagaaaaagagaggcaatgttacataataaatccagtatagcaaactgtatatcttttacccacttaagttgtttgttttcttttgtacaaaccaaaacatgagttatatcttttgctataacaattggtgtatttcaccaaattaaaatgaaagttgaaccaaaaagaagaaaggagaaactgcacaagaagaacaaaacatcgagttcgatgttgcctctctttttctcccagccatagcatagaccttaaggaacttctgggatgatcagagacaatgaataacaaagaaacaaaatggaggatcaattaatgtctcgttgtagcggtgatgaatgaaatagaatctggaaatctccgacgatttttttgttcttcttcgtcctctttgcttttactggtgtgttcttgaagggacagtacacctgtacagtttcttttggtatcttcaccattatatcaagaaactgaaagctgggttttcttcaagttcttcagctggtttcatttccgcaaagtccttctctttcattgaactcgatagatcatcagccgagaagggaatgctaagcatgcgaaaaaaggaaagttggttttgatcctaagcagttaacaaagcttctgcatagcagatatagagtgtgtagatttagggttaatttgttacctagaatcttcgtctaacaaaaaggcgctgctgtctgcgttgttggaatcctctgtcataagcactctcatgtttgcaatcacctgttcatgaacatgaatatagtagaagtgttaagagcagatagaacaggagaaagagagaaaacgagagctatttctacagaaaagcatacatcttgagatacacttcttgtgttgtagctgtcatcccagtacaatgtacatatcctataaagttgctggacactaaggatctgcaaaattgaacacaacattcagattctgatacaaattcttatgcagaatatccgtctattgtcgaatgaaaagagtcaggccgatggagggactcacagggcataaatcatgggcgatgtcatcgtacgagattctgtactttttatggatgacctgttggtaaatgccaaatcaagagacaatcataagaacgcacaaacctcttaccaccagatataagaaataaggaaaatagaatagtggattttttcttataatcagacaagagtaaaagaacataccatgaatccaactgcttgcctgatgtgtttcagttcatcccaggaagagccagcatactgcaattaaagaggacaggtataatgagccaaattgtgctgcgcataaattaatcaattcaaaaatgtagaaagggagattcactaagggaatacttcttctgttgtttcgttgcaccattcctctaacaatgctaaaccagattttacaaattctccgttgctaaatgtacaacattctcgtcgcaaaagaaggctacataaaaaatgaaccccgttatattaatgccttacatagacatgcctagctgatgatagaccataaatcaactctcacctgttaaataattggacattgatgaacgagaatgtctgaataaatatattttggataagtaccggaggaacctgaaaaaggaaagaactataagaattccagacattaacgagaaagaaaatgtgaatggagaatttcccatacaaaattctcctgtagtgtgcttagaattgcgtttaagccgtcataaatcccattccagtggtctagaggagaattatttctcattgtctttgaagatcgaaacgatcgcaacgatcgtccagttgatgtccgcggtgcctagagaggaccgttcatgtcagaccccacaacataccgagaaagaaaagaagactgatagtattcaaggtaagacgagaacaatgaatttttttcttagctgacctggatgcaaagggaaagcaacgtttgcaactcgtttttcaggttatctcgaatcattccaaatatcttttctacgtatgctgtaagctgctgtttaaaaagtaaagctggatccttggccacaacagggcgaatcactgcagccgctgcagcttctgctgctgcagaagtctcggcagaggaaggcgctgaacggaaaccctggtatagtattttaaaggataatgcttcagaaaattttattaattttggaacaaatcattatcatagactaacaaaggcatatataccatggccattcttccaaacaaggaagttgaaacaggtgttttttgctgtggagtggcaccgggtttcagactttgttggatcatgaacaacaaggttgaagtattggacaaccaatatgccaagtgctcgttgtcaccttcatcctgatagtaatgatcgtaacagctcaattgtgattatcatatatataatctacctccacgacaaaaaagaggacaatattccatccttgggtaccaatgtctaattataacgacttgacatgtaattcagtaccttgatagcagaaccaatcatttgaacaagacgatcaaacacactagtcctttcagcttcaaaggatttccaatgaaggaggcatttgtatattgtaaatgcagctacaggcttcccctggttgaatccaatattatttactacgcagttgataagagcaccaatattctcctatagcaagaaaaatatctctcttcaataaataaaaaaaggcacatccgacagatcagaaaaagctagaagggagtaattcaactaaaaaccatacacgttgacgatccagatgatatctccgagtctttgcatcagattcttgttcttgagttcttgccagtgtttcaatctcagatccctgcagagatgtatttaaaagacatacaaacagatggaacataatttagggaaaaagagatggaaaagcaagacaggacttacattgaacggactttctttgctggaaaagtgaccattttgtgagccctacaagaaggagagtaacactttaattatcatgattgtgtagccatccaagaaatgattttgctcagatataccttaactggagtcggagggagatgtcctgatgcctggatgagggatttctgcctcaatattttgttttcagattccacatctaagattttttcttgaagtctgcaagtgaaaaagtgaaaaatacgcttaatgttgagtgccaaagggatctttggtgaattcattaagagaccaagagatgtatggtgggtactcgtgcacagcagttttcaaattaacaatggtagtttcagcctctatagcctgcttcagtctctcctcatttattttgcttctctcctcgaattttttctctgtttcatcaatcttctggtccaatgaacttaccagggactgaaaccaaatgagaaataaaggaaatgtgaaaccttccttcagatgtcacagctttgacatccttaatagacgcagagaaagaaaaaaaaaagaaaagaagagagctaagttcctaccttgagcttttcattttcactagttagcttctccactagctctgtgtcaactacaggaacctcctgcaacacaggaacagtttctgccatctttttagcagcttccacttcctgtaagtgcaaggctttggtttccttgaattgaagttgcatttcctccaatgctgatcgtagttttgcattttcttgtgttttactttcttccatgtccgtctaaatcgttaaagccagagaaatagtgacggatatgttaattatctgaatccagtagagaagagctttaagaatggaaataatgcaaggataataggtaaacagtctttactaacttaccctcatgcgtttctctagctgcagtttccacgtgagttcttccacttgcttctcaagcttactcttggcagcttcaaggactcccgtttcctttgcagcctgcacgaaatatgaaggcgtcatggttgcaattattcatattttgggaaaagctaacatcttctgcctaaatttcgtagaccctcaaacggcaaagataatttccagcttctagcaattgcatcaaaagagccagctcaactttaaaacctcagccaatcgttatgtaaggacatatatttccattatataagctcatttaaaacccaacattatctgaactgttgcaattgccatatagtatactatgcttaaaacgagaacgaggatacacacaaagtgaagagaaggctcaccatcttaagcttccgcagttctttacgggctaaccttgctctccatgcactttgtgttgtaattgctgctttcttgagcctctggtagtgcaactgggccaggaatttgcgacaatgactctgtaatatacaaagagaacagattcaaagtcataaatttcaaaagcaattcgtgacaaagaagaaaatcacattacaattaatagatggaccaaaaataaaacaagaaacatgtagtcttcacaacactagaaacgtgtacagcacctgaatcataattgccgccttgtcctgcctttggaaccggagcctgccacgggaagccataccacgtattcctaattgaatggaaacagcagcaaaatataattccttgtaagacttccgagcaagatgcattcgtatgtctctctgaatctccaaaacagctgcatctctgcgcaagccctcaaagataagccgagaaagttgacctacaaatcacgtacaacaaagcaggggatgaataattagtaacatttcaagttgcctgagtagtaaactattgactttaaagtacctctgcacacagcctgcatattagttgcaaccttgcgaagcataagaaaagttttgcgggacaagtaggaacggaatttcctctggatcctgctggctgctctgcctaagacctcattcctccgagcatctaagtcagccatctgtccagccctgaggaaaaccttcgttttaccaatctggaaaaacaaaggcgcgtcataaaaggaggagcaatcagacgcttaacataagagttttaaagctcggccacaatgcaaagtattcaacacatggcgcttcaaaaacgtacttggtatccttggagtgcaactttttcaagaagtttcttgcaggcgacatcatcagtactagaaagaggccaaccatcagtactagaaagaggccaaccaaaagttagaacgttttcaatatctaggtaagtttcataactttaagttgaagagagggaacctcttatccaaaacttcaggagccaggacactaaatctctcgaggaattcttcaaacttttttcttgtcggaaatccagcacagctaatcctgattgcctccatcacgccctgaaagatatacatatctagaatttaaaacttgcatgtaactatgacaagcacatttattagaaaactaaaatatggaaatcccaccccacatcgtaactgttgcaaaacattttggttctcaaagatcaaaggcttcagaaggttattgggcttcacacaacgaatatagtgaggctcagtagtactcagcgtttcaagcaatgtcaccaattgttgctgcattaagtaagaaagtagcttcagtagtcataagattaattagacaacaatttgcatataactacttcatttactgcaccttaaatcgtgaactaatcgaagagaactttgactttttgttagcatcttccgcaagaagaggaaagaggcttgcaacaaaggcacacctcgaagcatttagtagagtctgatgctcggcaacaacataatctttgttcttttccaggaactgttcagtctgataagtgacctgaatatataatttagtacttacatattagggtatgaacaacaagttttttagggcattattgcattatactattcaaacatcgaagcaagcgtatactcacatcaccagcatagtggcaaattgtgaagtcggtacgagacaattttggcttactaaagtgcttgtgatctttgaacgtttgatacatcttttcggcaaatgtttcatgcgttgctcttgggaacatgctgcaagatacaggtatgaaatttagatataaaaggagaacgagacaatacgtgttgaacaatatcaaatcaagttcttagtcataccaagcctcattcaggagagaaatgataccaccagctttctgagacatgacaaaacaataatgaatagtacttcagtaaataatacacagcatagcagatataacttggtgaaactaaccttttcaataaggtccaaaatttcttgattatctacgaattcaatgtagctccaatcaatttcttctttattatattcatcttgttccattttgaagacgtgctgcccggaaaaaaatgtggatcactattagggacaaatcaggctgaagaatggcaaccatctgaagatgaacaaacctcagacaaacctgattaaaatgttgctgaagtttctcattcgtcaagttgatgcaaaattgctcaaaactgcaaagtgcaatacaaagcatttttcaaggaaaacacaagcaaaatccatttgatatattcactgcccttccatttcaaatatataaataagaaaggagagcaacatctacgaccctttccattgcttactaaaactagagatccataaagaaccaacaaagtaaacaagaggctatcatgtgaaaatgctgaaccttatattcttatcaggctaagttccatagcatttctctaaagtggtcccattcccttatcaaacaaaaggcataccgcttaagcacctgtttgtcttaaaactctcaaacccatatatatccagcactccaatcaaatactctgagtcaggatcttgtccaattgaatcattgatcttgttcacaatcctgaaagagcaatagagcaaattaagaaagttttattaaagtacgtatgcaaagaaagagaagcatttaggtacccaaattctgagtgtatttaagattagacataccaatcaaacaatcttgagtacacagtttttgccaatgcatctctgctgagtgccgcagattcttgatccagacacttcgtaatggtttcaccacgtgtcacaattacacgtttacaaagagaatcttcaagtgcctgctcatcgcacctgacgaaatccaaggagtcaggaactacttctttatcccatcttcaatgaatcagttccacgaagatttcacattataaattcatagataatttactcacatgaaaagctcagccgcagtctttagatggtagttggacgtgtcatcttttggggctgacgagtctgcttctttccctttaccaaattcaacgttacccagatgaagaatagcagccacaacttgaaatattgcttcctgacataaagttatatcaaaagacactcatatgtcgataccataatatttaccaaggaaatgaccaaaaaacaaaaagttacctgctcctctgaatttatcccaacaacatccattgcctttctagtttcacgatactccttcgcatcatccattctctccaactcaatgcattgagattgattcaggtaatgaaattttcttggatcggccagtttccattttttaatgtcctgattaaataatagaaggacagtacatcagggcaagaatttctttgacacatccttaatggaagactgcaaaattttaatgatacctccaaatgaattttaataaacgtgaaccaacagatacaagcaaatatggttattagtattgaatttttaacattgttgaaagtaaagagcaaagtctgatccatagctatttaaataccagatcaaattctgacgtccccaatgataataacgcatataagttctgggaagtactttaaaaggagatagagtccatatgtacctcaggaggtgcagcacagagcatgtaaaaacagtgatagttcctctcaggatctgagacctggcaaacccgtgatctctctaacaaataagtcctgatagcagcacctgatatccttcctctttgatcaaactgaatctccacgaatttaccaaatcgactgcaacattataatgatcatgaacatgaatcaataggtataaggatattcagcacaaagagagaagaaaatatgtacgcacacacatatgcatatgtataggtacatttatactatatacaccttgaattgttgttccttacggtctttgcatttccaaatgcttctagaacagggttggactgcataaaaaaaacaccaacatatctaagaatcgacttcaccgaaacttgactttgacaatccagatggtcatactaaaaggtataacatggataacctccaagactttcttttcgactgtccttccttcagaaacagctcgacctcccatgtctgccagatattgcatgagcaatttagtagtctcagttttccctgctccactttcaccacttaccagaattgattgactaatgccctgatttttcatttgtctaccccagtggaaacaagccagagaatgtcaaacaggaaacaaccagaaccaaaagaagaagaaaataaacaccaaaattaaaaatggcaggcacctgtaagctgcatccgcaactgcaaacggatgggggctcaattctccaaagcctgcacctttatattgttgcatcatatggttgttgtaaagatgcggtagtcttctaaaagggtttacagcaatcagaatattccctgtataagtctggaagaatagatatattagcgcaaatgcataacaaagtgaaagaagatatagacgttcaagaagctccagtgagcagaagaaattgacatatatcagtaaaactcatttgtaatgaaattcaatagaatactcacatatatctcatttatatcaaatcttgatttcatattttggaggactcctggttcatgtaaatatgctagccttgtcatatcatccactccagaagctggagcttcaacatcttttgggtaagcacttgaaactttaatagccacctgaaattttccaagaatgtaacaaagtcacttaatttgaacttactccacgtataaacaaacaaacaaacaaacgtaaaatttcaaaattgagaagttgatgggtaaataatgattcaaactggtaaaacataccgtcttccctgaagtacatttgaccttaatatcacttcctttaacctcgataacttcaccgtctatccatgccacttctggatcttccacccaaacgcaagagccaacattgactgtagtacaagcctgcaaaaccaacaattcagatacttctattttcacagctttatttcaacttctaaaacatagtatgagtatattccctttcaaactagtaacaagccatatctgctacaacaagaaactaaaaacagttcaaaactaaagttacaataagaagaatccctctccgaaagaggaccattctatactctaggtactacacttgtgtcaaagaactagaacccctaaatggatgaacttagaaccttgatccccagatcaaaagatttagaggatcatattcaaatggtaaattcatgttccagctcaagcattttagtaaaaccacatcaaaatctggtcaaacatgaatcaatggaaagtctcaccatccgatttctccgattttacctaaaagtctacatctccaaaggatctatctgtgcatgaaaacaaattttccattcgaataatccaattctaagatatagatcattgagaaatctccgataaaagtcaagccacggatcagtcaaccatagctactcatgaaaacaaacaaacaaacaatttcaacgatacgagaacacaatcgccatagaatcaagacactacgaaatttaaaactccctctggaatgtgaacggaaataaacccaggggaaaaacaaataacataccatttaccaccggaggaggcttatcagatcaaaatctattagctcgattatggatcgaaacgcatgagattcctccgataacagatgatccgttcacaaactcaaagtttgtacgtaacttacgccatgaagcagacgaactctgcaactccaaaatccagaaaatgatgattcaagagcaaaaccaaacaaaaaaatggccagaaatgcgattgatttcaatggaagcttgagaagctgagaaatcttcaagcaaacaacaattaataaaattcaaattggctccagaagaaatcctaatttagtcgcgttgggttatagacgctttctccttcttttttgacttctctaagcattagtgatttagtcgtcgagcttttactgcaattaaggtaagtaagcgtttatttaccgttcaattcataaggtggtgtccttaatgagttaaccttatgaatattggggcccacagttttaaaaatttaccatttcttttcttacctcttagatagaaataaatctatgtctatttccataattttgttttataaatatctagactaaaccctcgaaatcgatttaaatcgaacattcttacaatttagaacgttcacagtgagtgatcaactatgatcaaaattacaggggataaattcaaaaaatggtctcgcaaaaccccataaattcaccgtgaatatttcagccattagattataatgaatttgttcattttggtttttgtaatggaaaaattatggataaagtagtatcttacagtgattatattgatatatgaacaagttttagtaaacaatgtaatctttgaccgtgttgacaaaaattgtgaactttagagtataagactacacacaatgatcaaatgattaagcaactaactgcaaagaacaaaccttttgtactggtctataataagcaactaactgctttgtatcttttacttcgagggggtgcatgcaaacaaagaattggtactggtcttatgaaaattgtcacttgtccacattcgaggtaataatgtttgttttcacacaaaaggacttgaaaatatgtgactgtaaggtgaagagaacggtctacaatcacgtgtacgtatcctaaggagagacctcgcttgctcaagtgttgtccatttaccattggactgttattaccattttgcatcttttaccggttcacacggctgatcatctcgccgtcactaagttttctgatagacatagcaaatgggttccacattattagccaatgagaggcgacccaacaattatgattttgtctttctagtgtttattgtttaacatcggcaagttgggcgtagctatccacctttgacttggagcagtcaacggctgagattatcagattggtgaaatcctagccgttgatcttacggacgcgatcaaggttgaagcgttcacaaattgctagcattttagtagattagaataacaccacttcatcatcatatatgttactactttttataataagaaaaaagtcaaacctaaccagaatattatttgatgcataccaccatgtcttttatttcatctaataagtagaagaacattcaaaatatatgaaagtgggcaatggagtaaagtagtgactcagaaaggttgacaaaggaacacagagagtgtcaaaccagaaagggtacaagtctaggatctgtacggtgaggaagacccgtgcgagctcccaaagcccggcagctgcaaccagcctgcaaatacaaagatcaggatggaagtgatttatgtatgttccatttggaaatgaatgatttttggactgaaggtgacggtttggtgaagctagaaaaacattgggatcaatggccacttatatgagtctcaaactagtggcaagtgggaggtcaaaactaaacgattagtctggttttggcttaagattacaaagctcggttatgcaaacacagttacaagattcacataatctataggttatgttgaagattcatatacattggtgaaaacaaaacaaagaggttcagtttagaagagttaccacttgagcagcaaatggtaacattttctctgggggcatgccggcgcatatggctacagatcaaggaaaacaagtagagacaggtcagttttgggttttgggttctgatttctcagagcgtgtacaagaatttttgcaaattgtttaccatatagaacagctcctatgaatgcatcgccagcaccagtggtgtctacaagctcttctggaggaattttctccgctgttccgagaaacaatcttccggtcattgttcctaccccgttggccttcagctttgttgtctcctgcaagagaaaatgtgtgtaaatggtaggtttgttttcatacggtgaaaatttcttttaggagctagaacacataaataccgatgaaacacatgttggaaatgttgtcgttgagtcttttctatgcttcagtgtctccaacaagctttcaatgtctgtctcttgagattcaaatacttctgctgaagtcgacagagccagatgatgtttatgaaccggggaaaggatcatgtagaagttttgaatcctaaagagagagataaagtcttgggttttgtaccttttgaagctctttgaaccattaagcacccatgttcacctgaggtcacgatcacaaatttcagtttaggcaatctcaacaacatggaaacaagtgcaccaggagttgaagacacttctgtccatgtctgcaagacgtgagagactaagaatattcagcctcaaagcaaaaaaaaaaaaaaaaaactggaaaaacaagaacagaaactgagactaacttgcctgagggaaattttctggacagacaacgtagtcggcgaatggcaagagatcatctaaaccatctctttttttctctgtatcaactaaaataggtatcttcttgcgacttgcctgctctggataaacgcaacaagcacaagaggaaatgaacatgtaggttgtgtggcattttaagtttttggaaacacagaagaaaaagaaaatcttgtgaaatcttcaaacatcaaagactagtcttacatacatacaatcaatctactacttgcatgactgcggataacaattaaaaaaacacacttgttttggtgtatgtatttgggagaaatttagaaacatgtgaaatctacaacccatctaaaaggtaaagagatgcatgcttacctcttttgcaataaccaaagctgtttcgtgtaatcttacatcaaagtatacaatgctggctcggtctagcgctgatagcatactcgattgagaaaggtcagttggtaacataggtgggtctccaggcgtgtgaatacaagtacgcgttttcctgaaaagaataaccaataaagatctgatgatctagacaaacaaaacaattccatgccataggactaccatttcattctagttgatagagtaactttttgcttgaatacttaacaaatagatttgatacaataaaagtcaacagaagtcaatgaaacaggtcctcaaattcacaaacagcatcagggcacacaaaaaactcacgtttggttgtcaactaagatataggtaaatggtgaattaccctctttagagacctgccatgagatgagataaaaagacatcaattacagtcaagattaggaaactgaagacaaaactgcaaactttagagtataagactcgacacaatgatcaaaaagctgagcattaccacaataaaagaagtatccacaccatcagcttcaagctcctccaacatgccttttccttgagagtcattcgctacctaaagaaaatgttcattactaaatcaattagcatcactacactaaagttgaatctgttcatgcccaaatttttcgatttagaaaagagaaagcaatgaccttactaatcagtctcgaattcaatcccaaacgagcagcacaagttaacgcatttgcagcatttccacctccttgcacctgaaacacattctcaactctaaaacctaaaaccactgccaaaacaggaagaccgtaggtgggaacagaaaagacttaacctttaggctagtgcttcggatcttgtcgtcagcttgaggataagaatccaccgtcgctaagaaatctacagcgattccaccacaaccaagctgccaaaaatcacatttttcctataattgcgattcaagtcaaaaaaccaattcatggaggaggcacaaaaactcacgacgattgcgttatccggtggaggaggaacagaatcgatggaggaagaagaagacattctaatcctgaaactgaatcatagagtaagagaacagaatctatcagaaagtcagtaagagctgaagtaaacggagactgagaaagtaagtaacctagtgaatcgtctggaggccggaagatagataccggaggtggagaacagaggaagaggtgggacatgagtgaagcagagcatttctcagtgaaagagagagttttttttttggtcaacgagtgtgagagagtgtgtgtgtgtgtgtaaaatccagatgttattcgattggacggtgtttttaaattcataaaccggccagttcaatcggtttggaccgaaatcttttcgatgagttagaaggttttggttttggaacgtttttcttttttctttttttccttattgaaagcatttaactggtttttcttctggcttttgtcaaatttgtgtccaaagtgtatctcacatgatgatcacatatcttttgatgatgttatgtgacatgttgttggttttgaatggtaacatgttaaacagttatgacttatgatagtggacttaatgctacatttatgttgacgattggcttttgaaaatgctaaccagcattgatttaacaaaggagtaaataacatttgaacgtgtgaaatttttacagtatgcatctttctattaaatttctcttccaatattgatcttaaaatctctgcttaccctagttaaagataaacaagatggaaagttgactggtcagcggatcttaaagaaaggaaatttagtagtagtataatagaagcgtaaatggacaagtaaagaagatcacctcttgttgactaaagagaatccaacgtttaccgtttcttaatttccaaacatttgaacaactcatatgaatttgaatttcaatctagaaaaaagggttggggttctagtggtgaaggcttttgtatatgccccactttttataggattaatgagtataatttttatattttcttgaagattcatctcaggattattcgaattgatgaggtttgctcaagcttgattggtgaagaacattgtttcattatgcgattataaatgcaaacacatctatatttcttactaaaaaaaaaaaaacagaacaccaattacaacaactaataagaaacacaatgttagaaatacaaaaaataaagaataataaaaaaaacttttacaaaaattaagaagagaggaaaatgtagtgcttgtcaacagagagagatacatcccaagtacaagaaagtccctttggaaaagtgacaatatcacctgccccaaactctacacaccattcaacttctgcatccgacgatgatgatggtggtggtttagggtaaaccttaactttgcccctcaaaatgtaacatatctcttctgcttcatatttcaaatggtacttccctggtgaacatccccaccttgaacaacaaagaaaaccaaaactcaattttctaaatctatctcatgcaactttaccaaatggatctctcacccacaagtaaggattaaaaacaagagtcgatcttacttgggccatgacttgaactttagttcgtcaagacgagcttgagatgggttttgctcgacgatgattcttggattttgatctgccatttattcttttctcctttatttctgatcaacaatttttattttccaaagagacgagagaaatgagaaacctaagaggagataagtatgagagtgtgtaatcgttaatgctttcttttgacgtatttattcagtcaagatatggatcgatgcagtaagaaagagaaaatatctctattgactaggaaaaaaaaatgaagaacaaaaaaggaaaagcagatgactccaataatggctatgaaattttcagaattttggagaatacaaaccaaaatttcaccatttaataagtattattattaggtttagttccttctttataatgctaatcttgccatagtttgaaatgttattattagttgactgaaaattttactaaaaagctaggaaattttgtttcaacaaaagagaatctaaccttatagatatggtaataaatttatctttctatcataatttaagtgacatgcatgtgtatattggatccactgagtcaaaggtttgactgaacatccagtttgaccatcacgtggcataatctgaatggatataaatagtgcagtatctgactagataagggaatcatatggttctcgaagataccgacattaatactcaaagtcatattgtagcccacttttgtgatttttgtctctaacttgatacataccattgcaatttgcaaaatatcccccaatacaatcattttcctacaaaatcacagcttaaatttgcaaatatcctctctcttgcgagcacaaacttcgtagaccaacttaaaacaacttatatttgtttcaccaaatatagaaatacatgtcaagaatcaatgaagaatttaaaagctgaatgtaagatttctcgcaacacgaatgatttaggatataagattggtgtgagtttttttttttttttaaagaatattggtttgagttttgataaacaatatgacgtatgtgtgcaattatatcttcttcttttttggtacaatgcaattatatctttacatagcttttttaatccctttctccacgttttattttgatatattcttaaaattttggccatttatatctctttccagctcccgtgtgagtgtttgttttttactttgcttttttgattgtcgtcttttttatgcatgggatgatgatgaatcatgtcctttgtacttgtgtctcattcggacgtgtctcatcttcaaaattttcagctatttaatacgagtgagttagtacttttcttttcaaaaaattgaaagattaattatttaagaatttaaaatatataaaaaattatatcctataataaaactaattttgtaacaactagtctagtagtactagaatcggtcctgggctcaacaacctagccccctaattgtctttattttagaggcccattattttatttaaaggttaaaaacaaattcgacacaataagtagacgatttctatttctaatacgaaaataataatgggtgaattgcaaaagtaacctattttcataaattatttaaggatatagcactataaaatctaaaattaagtaagtaacatacagatgagatgaaatgtccacaaactccttatttgcaagactttagacatgctcatgctgacgttgtgaacgtacaatagatgggttaattccattttgttatttctttattatttttggatactattatttgtacaccccattacatattcttgctaaaatatctctttaaaataaactgattccgattctaaactttattaaaaaaacattaaatttttttctgattatgtcatggtttgaattttttaaaatgaacctttacaaaatagaaaagtagttgtaagtaaaaaaatttggtattctaaaaactgaaatagtatagacaagaaaccagagaagcaatatcaaatagtactacaatttcaaatattgtggtttggccaatgaaaacacccttataagcaatatcaatcaaaacaaacaatttagtttaaatgcatatagtataacattaatgtaaacagtataatcacaaagaacaatatattgtgtttttatattcactattttttattctagccaatcaaaatatttcaactaagaaataattaatttttaaaatcatttaattataaaatttaaaccttaaccatttttctataaatccaaaccgatatataatcttgtttacttacaaaatctaaaccctaatttttttttgtaaacccaaaccaacattttaactcgtttaattataaaatttaaaccctaagatactatatagggaacccaaaaaatataatttaaacgcaagtcatataagtaacattttattttaaacgatacaataaataaaatttaaaatatcgagttaaatgcactgcaaaagaaggactatatacaagaaaattattttgtaaacttgtttatggataattaaaatataattagatattcttgacataatttttaattttctataatcaaatcgaatattcacttataacaatagaaaaacatgcaatcttgtaattagtaattagttaaaataatagtttagttcgtgataatcttaattaaatatttgtttagtgttaaatttgtttgtaaagttctattgattacatcgctaattccataacaacaatagtatagtacattcacgttatttagctgatttgatttgataaaagaaatgaagaagtcaggatggtcaggagaagtagagaattgacttttgaggcacatatatcagcgagggtaaatatgcatatactatataaaatatgccacatatcaccgcttcttttctcaatggttagttattgaattataaagtttttgatggttatacactgcaatttcccaataataatctctcttctttaagaaaaaaaatcttaattatctgtctatggttttcaacgtttcgttcgtatcgacggtatcgtcgtccgattgtttcacatcattttgtgtttgaacttttcaaatatttgaggacttgcgctaattttttggggatatatatagtcaagagagaaagaaacagcgaaactaacatcttttattcccttgcaaagagcaacttaaaagatatatacacacaccaaaacaacaataaaaacaaaccacgcaaaagctacgaaagagtactaaaccaaacaaatcaaacacctacattgggatcattatcaccacccactctcctaaccatgatcccattcctaatctcatcttctgtgtacatataagccaaccctccgtgactcgtcggatccaccccagctatctcatcctccgccggtatcctcaacagtttcagcttatgcaaaataaaaaacagagtccccattgtcacactaacccaacccgtaatcaccaaaatctgaacgacgtgcgccgcaagcaacctacctcctcctcccattagcaatccgaaaggcctattcgggtcgcctccaaagatctcggcaatgtatcttttctccgcgaacaacccggtgaaaataatcccccacgcaccacaaccaccgtgaagctgagccgcttccaacggatcatcaaattggagcttttccgctagtctattgcatcccatcagcacccatgcggctacaaacccacatacaagcgcagcccacggttccacaaccgaacatccgctagttatagccgcaaacccgcctaacaaaccattgcaaacatcagttacattccaatacccatcaataagtcttttcccaaacagagtcgttaacgccgccgtgcaaccagctaacgtagttgttaccgcggttctcccaactgcgctccattgtccgtaaaacgagctccctggagtctccccatacgccttaaaaatagttgcaaacgagcccgggttaaacccgtaccatccgaaccataacaaaaacgttccaagaacaaccaacgtagcactatgaccacgcaacgtaaccggtttacccccaactccaaaccgaccaatcctaggtccttcaattaaagctccccataaaccagcaataccaccaaccatatgaacaacaccagagccagcgaaatcaatcacacctgattgaaacagaaggttctcagatctagccggagacgcccaaccatcagaagaccaaaaccaatgcgacacaatcgggtaaacaagacccgtcaagaaagaagaatagatcaaatacgcaacgaactgagtcctctccgctatcgaaccactcgtgattccagcggcggcgatagcgaaagtccattgatatagaaaataaggataatcaaacgtaggttgaggaaaatcatacattccaaagaaatgttttccgatgaatccattagaaggagatccaaaagcaaaagcgaaaccgaagagataatagaagagacctccggctgcagcgtcgatgacgttcgtgagcataatgttcatcgtgttttttgcacgtacggatccggcacagagcatggcgaaaccgagctgcatcgcgaaaacgaggtaagcagagaagagaaggtaagtgttgtcgattgcgtaagccgcatcagtgaatttcccggcgactgtgtcgaatctcccgcagatgtattcagcggcggctgctgctgcggtggcgttggctccacctgatagtaatggaatcagatcagaggcagagcaagagagagccgacgccattgttgcaaagattaagagagattttgtgagagatgaagaagagtcagagagtagagtttatagaggaggaaggtagagagattcacgacattctgttgaatcattattagagaatttgaatctttcagattctattctctcattttcactatagtaataattgtatttactataaccctaaattttaagattctgtaacagttttattccactattgttggtgttaactttgacttctcctccttaaacgtacttactgctcatttccaaagtaattaaatttttatattttccgaaaaatacgttttgtaatgtgtggactataattgtcctaacattaaaaaatgtgtggactaatttttattagtttttgtttttgggaacaaatatctttgactacaaaaaggttaatttacattctttcaattgataaattctgattggtaagtagtaaataccactggattagattatgacaaattttataatttgggttggtaaaataaattagaaaatccaaaagaattattgacaaatataaatcattaactttaaacgagggggaattaaactaaattgtgtgactcactagattatctcattctataattaccataaagcaggaaccataaacaaaaaaaatcatccattgaagaatatttttaaaagaatgaattttagatgggtatcacaaatgttatcgtagacttaaatctcctaaaccaaaaactctacactattaatactgtacagctaaaagtctacaattatgttaggatatctacactatcctaacgtaatgtttcaatcattcaagaaggtttcgaaatcgattttcaatgtattgtcttgaacagacgagggacaaggcaaggttgagtcgtccaagagccagtcttcaaactcggacaatactctatcgttacttcttcctgattgttgttgttgttgctgctggaccgccggaggattaggagtcatagttgggactgcattcgtctgaacattagcagaatacatattccggctaaactgttttgcctctttgctctgagataccggcacagttgagatagaaccagtaacaatccgctgtgcattgccttgtgaagccacgggaggagcatatcgggtaggctgcgagccttgtgaagcaacgggaggagcacagcaggtaggctgtgagccttgtgaagccacgggaggagcaaagcgggtaggttgtgagccttgtgaagccatgagaggagcataataggtaggttgtaagccttgagaaatattctgtacactgttttccggaggataaacgccattacttggccgtcgagtcaatacatatggattggaagggacaacttgaggacttggattaccattattagagccacttttgtgatttggtaatgactgcatagcgtgaggttgtgacccaggattttgttggacggttcttgattgctcggttctatgaccgggtctagtgtatgtttttgggtgaattgcaaccttagtagatttggagcaagcccggattcctaagttggttccagacgagttttggagcaacggtacaggtacatatacagatggacgccgtggagcacgtttaaattgtaatttggccgaagcaggtttcgaaacaggtcgaggtaacatatttccagttctgatgcattcccgttgatcattccatgtcttctctttatcattggcatgacagtgatcagtgttagagatcccgccactgaaccagtaagtacacggagcacgggtgtcacaaacataacagtgacactgtaaagaacaaaaagcaaaacaaaaaacgtcattagcaagaaaagaaacatcacttaaactgtctcaaaagattcttagaaaacaaaagaacaaacaaataacttcacattcttaccatctcacaaaacgtctggtgtaatgtggatttgaacgggtacttagcacaagcatgtcgcggatgcggaaaatccctacaagctacctacaaaaccaaaaagaacttacttagacatgttactacaaactgtataaagatggaaacagagcaaaatcaattccaagatttcattctatacacgatgaagaatcaaatcctatactaagtggctgcatatactaaaacttgacatataaactcaatttactctctgaagtagaagaacattgattcctacaagagtccccaagttaaaattctcgtagacaatactcaaacttaacgaaggcagtttcaaaatttgagtaaattagtaacaaattggggcgaaaattcaaacaagtggaaaagatcaaaaatttacctcacccttttgtcctactacaagaactccatcagtttcacaagtttcaatcacagtctccttcgccgtaggatcaaaatccaaaatcacacaatcgtcatcgtcgtcttcattctccaccgttggattcaacaaaacagtacctttgatgggtttcttctcatcggaaactcccagaattc

SEQ ID NO: 642 - DNA, 97714 bp, Arabidopsis thaliana
gaattccgcgcataagatggtttggagttgatggaacagagaatgctttagtgatggatttgctcggtccaagtctcgaagatcttttcgtctactgtgggagaaaattttcaccaaagacggtcttgatgttggctgatcaaatggtatggcatgagttttaatcacatttattgcgtctggttctgtttaaatactaatcatttctcttgagttatacatttatcatctaatgtgcttatgattttcttattccgattttacagctaactagaatagaatatgtacattccaaaggatatctgcatagagatataaaaccagataactttctcatgggcctaggccgcaaagcgaatcaggtttatctaattgactttggactggccaaaagatatcgtgatgccaacaccaaccgccacatcccttataggtatttgtggccatggttcattatattgtgtctaccatctggaggtggtaaattatcttatctgttataagtttttaaggtcacattatacaacttattaccttttatttggttgtattcagggaaaacaagaatttaacaggaactgcacgatatgcaagttgcaatacacatcttggtattggtaaggaatgctgccacttttttctcccctttgtgaagtaaagtttttgctcacatatttcgatttctctttcgcagagcaaggtagacgggatgacctagagtctcttggatatgtgcttctgtacttcttaagaggaaggtgtgttgactttttgacttgaaagaacctagttaacattgtgtttttggcagggtattgtttttccttgtttgagatttacttaaccgttttcttgctttacattttgttcctattttaatgaacctccttttctagccttccatggcagggtcttaaggctgttgacaagaagcaaaagtatgacaaaatttgtgagaagaagatatcaactcctattgaggtctatttccctctactgtgtgagtgaattgttttttgttaatcctcattcaactgaataatatcccatcctttgtaggttctatgcaaaagccaccccgtggagtttgcttcatattttcattattgccacacactgacatttgatcaacgccctgattatggattcttgaagcggctttttcgtgatttattctcacgggaaggtactttgagaaagacatccctccatcatttttataatcctctctgctagcatcagttatctacctagctcacttaaacgttttcttctttgcaggatatgagtttgactatatatatgactggactattataaagtatcagcaatcacagaaaactagaagtcagtctcaggtatagtttatcaataccatttgttatttttttttctccaggtgtatgcatattttgtcttgttcatagagaagatttcctggggagaagttttacttggttttgctattttttagttttggtgctaaatatagatatgcctgtcttcctaacaataaactgtcatgctgcaggccgttcctgggtctagtaatgctcgtgcaataccaatggacacaagcaatcatcgaggtcagctcgagttataaattttaattgtgtcactttctgattaattttgtaatagtatatgatgtgttttttgttttctctcgactttcacactggactcaactggcatagagtgtttggctgatttagtttcccgttgcaactgtttatttcaatatcttgatgctaactctccgtttggcaggaggaactaagatttcacatgaagcccaagtctctgaccgtgtcagaccggctaatgccagtggtccaagcccacagattaataccgctgtagggaggagtctgggttttgatcaagtccacaagaatgtacgtgcttattcatttgcctcttccaaataaatgttgtatcctgcaaccctcccccttgtgttagcatctcatgcctgcatctgtgttgcttcagagttctgcatggttctctgcttaaagcttttacctgttttgcatggtcaattgtcatcaacgagctctatattgtgatatgaactacatatagcataaatgattaaaacacgatactgatcatcacgaaatatgctcttgaccattattttactgaaaacccattgcagatgaacatgccatcatccacttcattatctcctgcgggtacctcaaaaagaaatgtcagacccgaaacctcaaattctgggtttgggagcgggaataaaaccggcggttggacttcaccattcatgtcaccggggaaatgatgcaaaaaaagttggagtatatcattcatctgatctgctgagcaagattatgtgtgcctttgggtctaaactgtgatttctgcagtgaaaagctctagactgaggttgaagatctgaatggagtttttccatgaacagcttactgtttgacaaaaggcatgaagattatgtttgctttccttcaagattctcacaaatgactgacttcaacctttgtataaaatcttgcaaccgggcgtgtaatttggttcttgtgattcattctcccaagttttcttctataaaactttgttcgtatttctgtacgtagttccctgtgttggggcataacctgggtttgctgtgtcatcaacattgtttgcagaaaatcaagagcaaagcatgagcagcttcagcagagatgccttcaaaggcttgagtcaagagttgcttgtggcagggacatgtcaccatcaagctaatgtgcagctgacgagaacgtaaaaggataagctatggctagcttctggaatgctccgagaaacacttccccctttttttttctctgaatttcctattcagtttaatggtattctgtgtttgatttttcttactcgattttgtgcattgaaaaaaattatatcaaaaagcttgacttgatccaaacatgcattttcaattgctattattaaaaaaaaaaaacgtataaaattgtagtctcaatattgaaatacaaacacctagaattgatcgatttggtagagaactagttagtggattaaatttgggttggctgattttcgagccataaactatttcgattctcagctttcacacccggacttttgggcctttaaatttccaccatcaactttcatattcccaaaattacatcatctatttttggattcatgcttaaacatacatttccaattgaaccattcatttaaccgggattaaccacaaatccgcgtttactgtaccgcgattgcgattaacccaactaatacccagacccgttaagaaaacgacgtcgttttcatttcgtttaactcatcaaaaagagaaagaaaacgacgtcgttttcattcttcttctttaactctcaaatcgatttagtcgttcttctttaatctcgacactgtgaaattagggttcttgagagagaaagacaaaaggggatttggggttttcttcttcggttcgaatttttgggtctcgatttgggtttcgaatagggagaaatgaagaattggtgggaggaaagattgatttaccaaagcgatccagatgaccccgatttcgaacctccagagagtgacattgaagccgacgatggaagtgatagtggtgatagcggagtcgaggaggacgaagccaccagaatcgagggagaggacgtcgggatagatggagacagagcttctgatggagaggaaaatagagaagacgatggtgacatagcgtctgatggagacgtcaatctagaagacgatggagacagagatgaaagtcaaaagaagaggactaccaaatcgatttgagagttaaagaagaagaatgaaaacgacgtcgttttcttaacgggtctgggtattagtcgggttaatcacaatcgcggtacagtaaacgcggatttgtggttaatcccggttaaatgaatggttcaattgaaaatgtatgtttaatcatgaattcgaaagtagatgatgtaattttgaggaatatgaaaattgatggtggaaatttaagggcccaaaaatccgggagtgaaaactaagaatcgaaatagtttatgactcgaaaatcagccaacccattaaattttcgaaccttcatcattttgcagaccccaaaaacggaaatcatcaaatcatccaccgtgccagcgtgacattacaaaatcacgtaaataccctcgtgtttgtttataaggtaaaaaaagattggcggacccaaaatggtgcagtagttaggtgtacaaatttttttttgaaggatcactactacggctcaaacaagcctgggtccatgtcactaccaccgatgtcagtcaaacaaaaataataatatatgtttttaagttcctctaatttcaatcttctaaacaacaaccctaaatccttatctctatccttgcgcttgatccagattcggttctgattggagctgccatggaacgcatcatcggcggcaagtacaagctcggacggaagatcggcggtggttcgttcggagagatttttctaggttttgtgttctcctctgttcttgtccctttggttttccgagtttgcttttttatttgaaattgacgctcttctcttctgtttgttgttttcgcagctacgcacgtcgataccttcgagatcgtagctgttaagatcgtaagtcccagctcaatttgccttgagacgaattgaatccatccaatctggagatttgatttggatctgctatgtctcttaattgattttgtttgaattgctttactctaaaattgagcaaggttttaaactcggtgctttttagctgcaatatattcttcaagctaacacttgtttttaattcaatcattttctcttgcaggagaacagtaaaacaaagcatcctcaacttctctatgaagctaagctatatagaattcttgaaggaggaagtatgattctctttcctctcttttctcagttgttggacattggagggattcattagcagtacaatactaatttttatgttatgtgtcaggtggaattccgcgcataaaatggtttggagttgatggaacagagaatgctttagtgatggatttgctcggtccaagtctcgaagatcttttcgtctactgtgggaggaaattctcaccaaagacagtcttgatgttggctgatcaaatggtatggcatgactttcaactattcattaggctatttataatatctgttgacttatacattgattatctaatgtgcttccgattttcttatcccgctgttacagctaacaagaatagaatttgtacattcgaaaggatatctgcatagagatattaaacccgataacttcctcatgggcctaggtcggaaagcaaatcaggtatatttctgcaacttcttatcttcatcagatgccataagtagagtatggtatgattgataagtctcatttttcaggtttatctaattgactttggacttgccaaaagatatcgggatgccaacaccaaccgccacatcccttacaggtattgtggccttggttcaatatacagattgtaaatgatctatctgtttttaagttttacggtcacgttaatcattatacaacttatttcctttattcggctatattcagggaaaacaagaatttaacaggaactgcacgatatgcaagttgcaatacacatcttggaattggtaagaaatgctggcattctttatccttatgtaaaagtaaatcgcttttgctcatattttgggttctcttcacagagcaaagtcgacgggatgatctagaatcgctgggatatgtgcttctgtatttcctaagaggaaggtgtgttgtctttttgaaagaaactagttaacattatgttatttcgcagggtatttctattccttgtttttagagatttacttaactgttttttgtgttcctcatttcatgaacgtccttttctagtcttccatggcagggtcttaaggctgttgacaagaagcaaaagtatgataaaatctgtgagaagaagatatcaactcccattgaggtatgtttccctattgtgtgattgattctttttttgttaatcctcattcgactaagtatatatcgatatcccattgcaggtgctatgcaaaaatcaccctgtggagtttgcatcatattttcattactgccatacactgacatttgatcagcgcccagattatggattcttgaagcggctttttcgtgatttattttcgcgggaaggtaggtactttggataaagacatctcttcatcattcatagttcactcagctgataaggttcaccggcatcatctacctacctcactattatatgttctcttttgcaggatatgagttcgactatatatttgactggactatcataaagtatcaacaagcacagaaatctagaaatcagtctcaggtatagttttcaatgttttctcaatcttaatttgctgctgtgtcacctttcttgttactaacaaaaagtattgtcatttctactgcaggcagttcctgggtctagcaatcctcgtgcaatgccagtggacacaagcaatcatcggggttagctctaattaatagcttgttgttgcaattgtttattttgaaatctctgttttctgacgctctgtttggcaggaggaccaaatatttcttatgaagccgaggcctctgaacgcgtcagatcggctaatgccattggtccaagcccacagataaataataatactgctgcagggaggactccggggtttgatcaccctgtccacaagaatgtacgtatttctgcatttgcctcttccaaagaaccgttttattctgcaaactcgttgcttgtgttagcatgtcatgtatagtattactctcagaacacttcatggttccctgaaaactgattttaccagtatcgctttgtcaattgtcatgaattaatgaaacaatatattgatcttcgagatgagttcccttgactgttattttactgaaaacccattgcagatgaacatgccatccacttcattatctcctgcgggtacctcaaaaagaaatgtcggacccgaaacctcaaattctggatatgggagtgggaatagaactggttggacttcgtcattcatgtctccagagaaatgatgcaaagaaaatgtagctttttcctgaaatggtgagtgagatgatgcgctgttaatgtgactccgtgcccttaattcacctctgaaactacagcagaaatcagaacttggtgtcactaacacctttgtatctcctccacctttggctggaagaaagatgcaatggtttctatgtaaattctctgaagtgtgtgtggacaagaaggcgttggttgaagcatttgtgtttacacacacaagacatgaaagtgtatgtgtgcttttcattcaaagatttcccccaacctttgtataattcttacacccggatgtgtaatcttgttatgtgattcatacatatcatttttagctactctttgctatgtgatcaatgaccttttgctgcagcttgatatatgtatacatgttaatggatagcgtcattctttgcagaaatccagagccaagcttgagctgagatgagtcttcaaaaggcttagcaatgcacaggtttctttcacagacgcccaagttcgattcttatttttgtgcaattgatttatgaggaaagattttgagagtcaacatgggattcaaataactcggagacagtgagtaagaaactattctgggagagaataaaatgtttgagagctcatgaagccagttgaaaaacgatttgatgcgctcggtcggagaaatcatcatcatggaagaggcaggtgaccaggtgtaggttgtatttgtacagctgtaatggaaacctatcttaggccataagggaaaatccaatttgtgtaaactaaagtaagtttgtcttaaatttcttcatagtgtttagtaattagtatcatatactcttcaatatttgcttttaaatatttctgttatctttatatattgtgaaaattgaaatcaaatccagacggaacctaagtaattgaaaaccaaaacaaaaattaaattgaaagtaatttactacaatttgaattaagctacatcattattgtttttaaacgaaaatttgatccgataccaactccaaagaagactgaactctactagaaagaaaggggcgttattctaaaacaggtccatattcaacctaatacacctataatataaaatagtttcgttaggttctatttaataatttattttaaatttaacttccattcgtaatcggcataagttggaccacatgataagtatgatgatgcaatgacttgctttttacataacaacaatctttggcctcatctacctatttcgcattataacatgttctttgaatcgtttcccattttgtttttacatcatacaaacttaaaaagtttcatctacggtgctgcacctgcactcgaagcagcccaggttccatcgtggtgtccttcgttacaaagttaagaaagaggttccaaaataagacatgaaaaagaagaaggtgttccacttatttttaagactgttatatgcttatatgaaggacaaaatatacatctattttaagtttagtggcatataaatatattacaaagaaaaaatcagaggagtcagaatcccacatcagataattataaatatatcttatatgattgggcatataatttcataattggtaactggaaaaagaaagtaagataatcaaaaggaaattgctaggtcttgaatataaaattgtatattaataatcaaattggctaatgtagtgtttgttatgaaattaaaatattattattagtagttagttgacctacttatatgtatttttgtaatcaattacatgatttagtaataatgttcgtccaaataaaagaatacaattgtcaagagacaaaaccaagagtagttgtgttttattttgaatgaaaaggaaaactaaataaatagagttagaagcaataattcatatatcatatacagtatgtgtgagtgagttatgtgtgtattaaagtcttaaagttataaatgtataatatatgatgcattcataacaaaatcataacatgtagccaagttattactttatttgtaatagttgtgtataatacatgttgaacaaaaaatattgcagtaataacaatgaaactgaaaatgagcctggttgcttctgtaaccaggtaagctgacatgttccttattgaaaacaattattgagctctttttaaaattaaatccagcaataattcaatcaattcatatattataagtcaaagctttgtttatacataaatctatcttatttacacaaatcagcttcgtttgatccaactaacatgtattaagtattaacattagtagaattctctgaacataacttaaaatcaaaacttgtatctactaattatgggaaaatagtctcaaattgaatctgaaaaagaattgcaaatttttaagaaaaataaagaaactaaacatcaaagtgttggtgtgttgtgttaatttgacttcttttttctctgttagcaaaccattgagcagtttttctagcgatcggcagccacaaacgccgtcttctctcctccgtctcattcccaccgttttgtaacgcagacgcagtctctgcggctgaaccgctgcaatctccatgaatcgatatactgagtctaggaaccgcagtgatgtcagacaccgatcttcgtcctggttcgatcataacgcttcttgatttcgaaccagagtctccgttttccgaggaaaacatagttgtcatcgaagttaacttgttctccaacattctcttcgcttccatctcttccttgattcgcaagatacctatctgatcctcttcatctcctctcttcacatgatccaatgaagaaaatctctcgctagaaatcgaattaaccatctcggaattcaaaaacatcaaatctgatgaactcacgttgctccaacgattcttgaaaacaacatccgacacaacgatcctatgattgaacttgtgcataagcttcttctcatctttatcgttcacgtgttcatcaagtaacgttttttctttattacctaatttcagaatcttccggaaactctctccgatgctgaatctcgacgacccactaagttcttctctgtgtattctttcttcttcttcttctctctcgatgtaaagctccaagctcgaatcttctctaatctcagactgattcaagaacctgaaactgtttccgttagtgagaacagaggaatcttcttccattgagactctatctctgcaaagaggacaagttgcgtgttgctcaagccactgatcgatacatccgatgtggaaagcgtgtctacacttaggcaacaatctaagaatctcaacactttcgaatttagacaaacagacagaacaatcaagaccttgttttgatcctttcaaagcagagaatctaaacagaggaagagactcgattgctgttttgtctaaaccagagaatcgatccgatgatgccgttgaccggttaaagaatattccttgtctgagccggcgatcgtgccttcttctgtcgccggaacctgatcggagatcgatgtggcagcacttagcgtagacgaggaggacgaaagtgagtgcgaacatgatggcgagaactccggtgacgacggctaaactcggctcaaaatttgcgacgaggtcaccgtttctgaacggaggaggagtctgggcagaggcataactgtggaggagaggaagaaagaaaaagaagatttgatacatcggagcgttcgagagaaactttgtttcttgatattcttgggtttgaaatagttttattggagatgaaaatgagattatgttagagaaagtgatatttttcggtgtatgctataaactaatacaattacgtcatatacgtgacaacaatttgtatgctattgctttttatctatgctctatttgtcttctactattctctccatttaattaaatacaattttatctttcggtgggctgttattctccgacctcatttttgatgatacttaggactacaatatatatggaacttatttatcattttataaagttacaacttgcgtcacacatttggagtgatatttttgtttagtttttggtctgcgaactattaaaaaaaactacatatataaccaaatctcttttcaattcggttccatatattttttgtcatatggtttaggttatgctatttaacaaaattattttgacgttacttgacttatttatgtctgctcttccttttttatccatacacagtgaatcacatacaaattttgaatacacaatgaatcacaaatatacatatcttgatcgttctctcgagtcattttggtttgattgatgttaaaacaagtatttatataaccgcatgataagctaaagtcgaaattaattactttccaaaacatgtgaacgtccaaccataactaaatctcaataggaggattcgtaccatggttttctaacttcacggtaagtgttttcaagttttcaaccatgaacaaacttgattttttttttttttttttttgtatgaggttatgagaagtcgtttactctccaattatggtttcataatgaatattttcgtttaataaaaactaaaaaggaatgccatggttgtacctagaactactagtttattatttgtgacaaagctactaagtatacttgctagtaataaccatgacaatgttatattataaatgttaatgaatcgtgacagattaactaagaaaaagtcaacgaccagctgcacaaaattccggtgcggcaaaataaagtcaaagttgcattactcatgattggcttcgatgctttactatttgtgaatcagagagaacctcctctacaatcagaaactttgctttctgcgaatggacctgcaacactcaacaatactttgggcctcagtcaaagtgtcaagcccatcaacctcaagtcttctctaccttgcaacggtaacaagattcctcaatttccagcgcatcaacgtacgggattcacagctaatcatttgtcccttcataacaaatttgatcctctttgttcctctgtcgtgatgtgcagctaatgacgtgtgacctagtgtctcaccattttggggttcatatataaactcttctctgtcattgtaaaccttaagctgaaatattcaataaagagatttctcttcatcatcgttttatcaatactttcatggtatcagagctcagtcgaaaatggctgacaactctgattcatcttccgctctctgtttttctcattatgttactctgaaactctcaactgcaaactacctcttgtggaagatccagttcgagacttggctcaacaatcaacgtttgcttggttttgttactggtgctaatccgtgtcctaatgctacgagatctatcagaaatggagatcaagttacagaagctacaaatcctgactttctcacatgggttcaaaatgaccagaaaatcatggggtggctccttggttcgttgtctgaagatgctctgcgttcagtctacgggttacacacatccagagaggtatggttttctcttgctaagaagtacaaccgtgtctctgcctctaggaaaagtgacttgcaacgtcgtttgaaccctgtctctaagaatgagaaatctatgcttgagtatctaaactgtgttaagcaaatctgtgaccagctagactctattggttgtcctgttccagaaaacgaaaagatttttggggtcttgaatggtttaggtcaggaatatatgcttgtgtctacaatgattaaaggttctatggatacctatcccatgtcctttgaggatgttgttttcaagctgattaattttgatgataagctgcaaaagtatgcagaggttcctaatgtttctcctcacttggcttatgctactgaatcaaactactcaaagtggtcaatctggtggaaatcgaggtcgcaacaactacaccactaaagggagaggtttccctcaacaaatctcaagtggctctccctctgactcaggaacaagacctacctgtcagatctgcaacaagtatggtcattctgcttataagtgttggaagcgttttgatcatgcttttcagagtgaagacttcagtaaagcctttgctgcaatgcgtgtctctgatcagaaatccaatccttgggtgactgactcaggcgctacttcacacatcacgaactctacttctcagcttcagtctgctcaaccttacagtggagaagattcagttattgttggcaacagtgactttctccccataactcacattggttcagcagttctgacaagcaaccaaggtaatctgccactaagagatgttcttgtttgtcctaatatcactaagtctcttttatctgtgtctaagcttacctcagattatccttgtgtgattgagtttgactctgatggtgtgattgttaaggacaagctgacaaaacagctcctcacgaaaggaacccgccataatgatttgtacctgttggagaatccgaagttcatggcttgctactcttccagacaacaagctacaagtgatgaggtgtggcatatgaggctaggtcaccctaatcaagatgttctccaacaacttttaagaaataaagccatagttataagtaaaacaagtcacagtttgtgtgatgcttgccaaatgggaaagatttgcaagcttccttttgcttcttcagattttgtttcaagcagactcctagaacgtgtccactgtgacttatggggtcctgcaccagttgtttcttctcaaggttttcgatattatgtaatctttattgacaattactcaagattcacttggttttatccattgcgcctcaaatcagatttcttctctgtctttctcacgtttcaaaagatggttgagaatcagtgtcaacaaaagattgctagttttcagtgtgatggagggggtgagtttatcagcaatcagtttgtttctcatcttgcagagtgtggaatcagacagttgatctcatgtccctacactcctcaacaaaatggtattgctgaaagaaaacatcgtcacattacagaacttggttcgtcaatgatgtttcaaggcaaagttcctcagtttttgtgggtagaagctttttacacttcaaatttcctgtgcaaccttcttccatcctcagttctcaaagatcagaaaagtccatatgaagttcttatgggaaaggctccagtctacacttctcttcgagtttttggatgtgcctgctatcctaatctcagaccttatgcaagtaacaagtttgatcctaaatcgttactatgtgttttcacaggttataatgagaagtacaagggatacaagtgttttcatccgcctacagggaagatatatatcaacagacatgttctatttgatgaatccaaattccttttttcagatatctatagtgacaaagtttcaggtacaaactcaactttagtctcagcttggcaaagcaactttctcccgaagagtattcctgcaactccagaagtcttggatatctctaatactgcagcttctttcagtgatgaacaaggtgaattctctggtgctgttggaggaggaggttgtgggtgtacggcggacttagattctgttcctataggcaacagtctcccttcttctccagttactcagcagaattcaccacaaccagaaactcctatctcttctgcaggttcaggaaatgatgcagaagactcagagttgagtgaaaattcagaaaattcagaaagttcagtgttcagtgaagctacaacagaaacagaagctgctgacaacactaatgatcaaagtcatcctatgataacaaggtctaaatcaggcattttcaagccaaatcccaaatatgctatgtttacagtaaagagtaactaccctgtaccaaagacagtcaaaacagctcttaaagaccctggatggactgatgcaatgggtgaagagtatgactcttttgaagaaacacatacttgggatttggttccacctgactcgttcattactcctttaggctgcaggtgggttttcaaaacgaagctaaaggctgatggaactcttgatagattaaaggctcgtcttgttgctaagggctatgaacaagaagaaggagttgattacatggagacttatagtccagtggttcgcacagccacagtgagaacaatcttacatgttgcaaccattaacaagtgggaaatcaagcaacttgatgttaaaaatgcctttttacatggtgatttgaaagagactgtgtacatgtaccaacctccaggttttgaaaatcaagacagacctgattatgtgtgcaagctcaacaaagccatttatggtcttaaacaagctccgagagcttggtttgacaagttcagtacttttctcttggagtttggtttcatctgtacctattcagatccttctctgtttgtgtttctgaaaggaagagatctcatgttcctcttgctctatatggacgacatgcttctcacaggcaacaatagtgaactgttggacacactgcttgtctctctgaataaagagtccgcatgaaagacatgggaatgctgcattactttctcggaattcaggctcattttcactgagaagggttgttcttgcatcaagagaaatatgctatggatctccttgttgcagcaggaatggcagattgtgccccaatgccaacccctttgcctcttcaattggataaagttcctggtcaacaagaaagctttgctgatcctacttattttcggagcttggctggtaagttacaatatcttactcttactcgtcctgacattcaatttgcagtcaatcttgtgtgtcaaaagatgcattcccccacagttgctgatttcaatctcctcaaaagagtcttacgctatctcaaaggaaaagttcaaatgggtctcaacttacacaacaacacggatatcactttgcgtgcttatagtgatagtgactgggcaaactgcaaagagactagaagatctgttggtggtttctgcacttttcttggcactaacataatcagttggtctgcaaaacgtcatccaacagtctcaaggtcctcaacagaagctgagtataggaccctctctatcgcagctacagaagtgaagtggatctcatctttgcttcgtgaaataggcatctatcaacctgcaccaccggagttgtactgtgacaacctctctgctgtctacctcactgcaaatccagcaatgcacaaccggtctaaggcctttgatgttgattttcactatgttcgagaacgtgttgccttgggagctttggttgtcaaacatgtccctgcttctcatcaacttgcagacatcttcaccaagtctcttccccaacgtccattctttgacttaaggtacaaacttggcgttgttttacctcccacaccaagtttgagggggtgtgtgaatcagagagaacctcctctacaatcagaagctttgctttctgcgaatggacctgcaacactcaacaatactttgggcctcagtcaaagtgtcaagcccatcaacctcaagtcttctctaccttgcaacggtaacaagattcctcaatttccagcgcatcaacgtacgggattcacagctaatcatttgtcccttcataacaaatttgatcctctttgttcctctgtcgtgatgtgcagctaatgacgtgtgacctagtgtctcaccattttggggttcatatataaacccttctctgtcattgtaaaccttaagctgaaatattcaataaagagatttctcttcatcatcgttttatcaatactttcactattttagtctttcaattacttctttgttatagaatttaaccacaacattatcaatttattaactattaagtaagagtttgacattattcttgcaggttttctgtacaaccaaccgtatcaatggtatcaggttttgacatgacattacataattgaaggttttgctgtcgttacatagtagtcaaaatcaaagtgaattattttaccaaaatagttgtttagattttaaccaaaggaacaaaggacaccgataatgttatggttatatataatttcctttcaaccaaaaaacaaaaaggaaagaagaggattacataaggaattgtgatgaagtagagagattacaacaacataacagaaagctcagttaaaaaactttggcttgagagtttgatccgactaaacataataaaatgtatgttccaaaaagaaactcattacaaacccttccatttgtttacaagatttcagacatctttttttccggtggtgacttttcaggtgtgagctgacgctgcagtcattcccatggatgattctgggctaacgtactcctcgcttgcgtgccgtacaaactcctccggtgacatgtgcgagccgtggcaagcgcatacgattttgatctggtttgcgttgtaccggtatgtgacacctgagattgtccgtccgtgtgggcctgaaccagtggttgagacccacggtaagttgggacgtgccccggatcctccaaacttcacatctgctgccattccaggttttatggcagaaaagtcgaaagagaaagcggtattgaggttgctgttgtctcccgttggtcgttctgatgcatcctcggatgaaccttcttctgcaacaggttgtttgccttcgccttttgcagtagctttttggaaggaaaagttactatttttgctgtaagagtactaaatcgtgttttaagggaaggttttgcttacctgagtttgatggaactcttccagcaaatggagattgagaaagtgcgacaatccctcctgaaccgtccttatctagcatagggagctggactggtgagtatccgaacataatcgggagatttccagcattagcattaggctgcaatagacttgtagctgctgcgtgttgtccagactcttttgtcggtaaagagtaaggcatactagtgacgacattttgcggatgaactgtgaaaggtacggtgtaactcatgttgcgcattgtaaactcttcagtgccagatccaccatggttgctcctcctttgaccagttaagttgtccacaatgtttgtatcagtaggaggacgaaccacctcctttgcgtggttggaagaagaaccaccacctacttcagactctgctacatcttcgttttcagctgttgatccttcatctgtcgcagttgaaacatgggatgcttttgtcttcttctcatgcatatcaacatgagacgagtccttctcttttttcttatcatcattcatccccgggaacccgaactttcttttgttccctgcttctttccgtgactcatcctccacccacaaaggtttcgtagaagcttcagcctcagttgtaggagcttttgagaggtcattgaagaaattttgtggaggctgttgacccgaatcacttctctgagaaccagaactcggctctgcaggtctttgagaagttggatgcaggaagttcttaaagtcatcaatcactttagcacttctatcgcctccttctgccctgtagttctctgaggagcttccagcattattattattgttacccttagcttttcctgttgatcctccacaagaaagacccaagctgagctcgagcccattatcatcgtccattttttctcaaactttttaagcaaactctgagcaggtcaacagatcttcagagcaccgtcaacaatcttgattaccatctgagaaaaatacatcatgggcagaaaaggactcattatccaaagctaaccaatggtttctagaaaaaagaatcaaacgcaaagctaagaactttgagaatcatagatggctgcggaagtaaacttcttctaaatttataaaaagaaacacatctgcttgaacttgcaacaaacatcacatgctttgccaaaatcaatcctagtattcagtataacaaattaacaagctaccagaactctcagaaacattggactcggatagtaccttagaaacaaaaccattgaaagaaacaattcagcaattctccagaaactttcttctcgctcctaccaagtaccttttgagttctgtgataacaaaaaaagaccatttctacaacttaggttctgaaaacccccaatattcatcatttccattttgagaaactaaactaaaatggaaacaaagcaaagacacacatcactcacacttgtatgtcagctaacaaaaaaaaaaaaggaatcaaaatccagaaatcagagtgagagatagcacaaagatctagtaactgataagacactatgcagatctgtcagctaaacgagctacatacgaagaaacaaatcaattgactttctaaagatcgaaatcatcaaaagaatcataacctagacgcgatcagattaaaaccctgacccctaactacacagcaataatgccaaatcagctcaaattaaatcacaataagccgaataaagctaaaacagaagccgaaatcagaatcgagaagatgaaaacctgatgaaaccgaggaagaagacgaacaaaccctagagcttcttcgcagcgtggcggctcctagacagttgcatcagcgattggggcttcttcgggttcggacaactagtacggaccatttcccttttcccttcgtaatactaataattattattttattgtacaattagtttcgatttcgtccatgtgtatcttgtgcattttcttaacttttgaataaataacaatcgtatagtcagcatatatactacatgtttgcaatcatgaatatatttgtacattgtacatgtccaatgcatgaatagaaatacatgggcccaattttctttttaaagccaaactagtccataactattcacatctaccaacagatttttcatttctttaacaagttttagaggaaacacatatgacatatcttatgcgtttttataaagatatactaaaaagttggtcacatagtatataatctatattttctagtcaccactttctttagaatagttggataagagagacaacattacaagatatgctaaaacgatttaattactccatatgtgtgtaaatcgtcacttaatttaatacttcaaaatttccttcgaaaaagacatagctaaagatatgtggggataatatatatatatatatatataatagtatcaaaagctgtttgccaaaaaaaaaaattcaaaacgataggtttatatatatatatattttagattgattcatgatcaataaagtcgctttggccgagtggttaaggcgtgtgcctgctaagtacatggggtttccccgcgagagttcgaatctctcaggcgacgttatcattttatttttgatatttccagcttttttttctttgtcaggcttttccagttttttttcctcctaaattgacatggttttattttttttgtacaaaaaattgacatgttttttttttaatacaaaaattgacatgttaagacttaagactaaagaggaaattggaaattggaaatttgaatattataaaataaaattatcttatgttgtaaaattttaatggcatgaaaatatgttacttatgtaaaaataaaataatgaaaacaaacatggttaataatattgaaaagctacaacatgaataaatatatactttgattgactcataagcaataaagttacatggttttttttttattatttctgatgctattattcatagttttataagtttgaaaaataaattaaaaaggatcattaacaattcaaaggataaatagacttgtttctctctttttaatcgtcatattaaataccataagatgtcgaatttttcaacctaatgtctacgttgatgatgttgtggctatccaccgtgagacggtgaagaagacccctcaccgtctcccacatacaaaatcgccgccgcctatcacattgtttcaaagaaactcctcctcaccgacttgctctcaatagaagtgaactcccatctcccaaccctagtcccaggagcctccatcatcgttaccaacaattcacgataatacaactctaaatattattctctcagcttcaacttctcatgaaaatcatatatgttttgttactcttcaaaaatccaaggaataaaatgatagaaaaaaatatattcttagagctcttggtgatttcatacttgtcttgattgatatcacaatattcagaacaagtaatcacaagtagaagacaagctttaaaaagaggaagaagaagagacttgtagttattgcattgagaacaagtaatcacagattcacagtatagtcgtcatcaaaggacttgaagtcaaccctacggtaactttttattgagcagcagaggatgagcattccggttcaggtttactctagggcggttcatcctccccaattaaatcgcttggtatggcttgccaagagtcaacttctagacgaatgtgtcccggttttccatccatggctttccgtactattgtttggtactcgacatgcttaccactcggatgatgatcaccactgcccttgaaacccatgtagaagatagcgttgttggccttgagcttcaagtgcggcgactcttcacagctcttccgagtctgtacaattacatacttgatctttaatggtagaaaactcctcaccagcgagctctttatatgatacaaaatacatttcatttggttagtgaagagaagtggaggcaaacataacatcacgtctttcaagagaaaaaaggaaggtaaaagaacatataccgcatgccatttccagttggagtacaatgcaatctcagcatacagatgaagccactcattttctagaatgtctgattcttgcacctgtgatgtgtaacatgttgtgaatcatcaatggaaaactatcgtatgctattccaaaaccagattacgtacgaaaaattaccacatagtattcatccttggctgcagccaacaaatcttttgtcaaccacttaggcagtttacctttgtagtaaacatcgatggcctcctcttcccatccccatatccacccacgtccaatacaagtattatgagggccagtaggacctgaacaccacaacacccaaacgataaataaaagctaaaccgaaggaagatacatgacatgacaacaacaacaacaacaacaacaatgttgagatactacacataccttttaatctagcaatatatgtctctaccacaaggtatccatgttctgaagtttgataccattcacttacgtacgtttgaaaagtgcatggagagttgttgtatgtgtctattgcctccaacgttatgtagtagtagtccccagaacttaccccaatgttattagtgttgtacttgggaatgcacatgagtttgaggttggttccctaaaagtagagatagaattcaaacattaaataaaggaactacgtcacgaagaaatcactataaaaactattacaaacaaaaaattaaaaaaaattagaaacaatggaagatattgtttgtttacctcgtgaagaagattgtaacagtgaagtcccaatcttccaaaaagttcgatatcataagtataagcattctcatctttcaatggacagggctttatcccagcatatctaaagtaatcaacatcaaaaccctgtccacgttcacaattccaagaatgtatcatcagactaatcccaaattttgagaaaagcaccgatcaatctaattatgacgaaagcaacttagaaagagagagagagagagttattacatcggactcttcaacttgccgtctatacactttttcttcttcagggtccatttcaatatcactctcgctactatcgttctccgacattctccccaaaccccagtatcacctgaacactaattttcttggaaattcctcaaatctatctgttcgaacgaggtagcaaaatatgttcttcgagactatatataaaggaacttgatgattttggatggccacatggcgttttactattcactccctcttataaattgaaatttattcccaacaatgatgagaatggtaattattattcactcttaagataagaaatcatttaaaattttaataatgttttggggatttattaaaattttgttttatttttttatgatcaccacatggcataataaatcttgggaaaatatccctaaacaattaggacgagatattttaccataaagatatttaaacaagaaattattgagatttcatataggtaactacactttggtaaattttaatgaaaaacattatgtaaactatagtgatattgaaacattttaatttatcacaatctataaacgtatctagtaatatctcatttaacaatattgatgatgatggatgtttttttttgaaataacaactagttttttaaagaaatttaatttctttacttaatatcaaattttacatttctatataaaattcgtcaaattttaattgatttttagtaattaacttaacgtagtgatgtagaaacctttatttgatttagctacgacacagtaaactcctcttctgaagtttgcagattgcccttacatctgccaaaatgaccgagtttgcgatcctgactccgaagtttggagatgaaccgccgcagcgtgaagcatcagctcataaggttttgaaggccaaaggagaaccatggatggattgtcggcacacatttgcttagaagttgactctttgtctagaagtttactgtgaaacaacgaaatcgattttttctagctttttatttcttatttttgatataggttttaaatactaattccacatgtgctttttgagacaatttctcttttgtttatgttttaataaattagcaaaacactaaaaggttaataagtactaaatgagttggccaacttgaattggtcaaaagttgtaagcctaatcccaattgtaaaaaaaaagaaaaaaagtggagaaggtctctgtatataataaacacaaacttctaccatcattcacaaacttaaaagccttaaattaatctccaactatgtttatggccataaaaatttccacccttttcctcctcttccttttggttgaaccatgcaccccaagatacataccagcagatctacatgaggccaacgaagaagggagacaagtactaaaggtaccagatgaatcaaagaggcgctacctccgtttatttaaatggaaggtggaagatttgcaacgtgaagcagatgagaaatacccactctggaaatctaccaatcacttggaccgatctttgttcctactagagaaagctcaggattatgttcagctttgggacacgtggaggaagggcacatcttttgccggaaacccatacggtgacttgcggaacaatgttcaaggtgacttgtggcctaaacactatgattactgtcgtcaatctgagggcacaaatctcttgacttacttgatgtatgatttttgtcgtcaatctgagggtgcaaatctcctcaagtacatgacctatggcctcagtccagaagctgacttggtttagttccttaatttttttcttttaattcttttttttcttttttttagtaggcttttcgtcttggttttgagatttaatttgtttccaaaagagacattattattataacaataaaaataaacaactaattgtgatcggagaatatgaattgtaatcagagatgtgttcgttaaacaagagcaattttcataacttattttcctttatgatgaatatataagaaagaaatcacaagcgcaccataacttatttatgctccagctgcctttgatcttcgaaagcaatccttatttatgagctcggctaagggttggattgatattcaaaagtgatttaggataactctattaacgataagtagacttaatcaaagatttaatgttatcaaacaatattattatttatttgataattatattctgttaagatattttagtgaggatactttagtaatttataattgaaaaaaaactttaaatagttttttcaaaggcaatttaaaagaccgtattgcctaccaattttttatttaaagactgtatttttcataaataaataagaatgtagggtatttcccccaatttaattttttaattagtcaatgagtaatatccgttaattatccgttattatttctttcgtcccaaacctctggagactcttttgacttatgataacctttcttgccctgactgatggtacatacataagtcaatttagcttttgttatcttcggtgagaattaaaaggacaaaaaaaaaacgctccaaaacctatttactagggtacattttttaccaaatcttaaattcaacgcaagatcatgtgtttacggtttacccaccaagcaaccgctgaacacgagattgtcacaaacgtaatgataatcgtccaacctctccagcccatagagtccgtgtggttttcgccgtgtgttgtgaagtgatacggtgccgatacacggtggatagccacaacatcgtcgacatagacattaggttgaaaaattcgacatcttctgatatttaatatgacgattaaaaaaaaagaaataagtctatttatccttggaattattaatgacgctttttaatttatttttcaaactaataaaactatgaataatagcatcagaaatcataaaaaaaaaaacatgtaactttattgcttatgagtcaatcaaagtatatatttatttatgttgtagcttttcaatattattaatcatgtttgttttcatttttttatttttacatcagtaacatattttcatgccattaaaattttataacataagataattttattttataatattcaaatttccaatttcatctttagtcttaagtcttaacatgtcaatttttgtattaaaaaaaaaacatgtcaattttttgtacaaaaaaaaaaccatgtcagtttaggaggaaaaaaaactggaaaagcctgacaaagaaaaaaaaaccatgtcagttaagggttggattgatattttaccataaagatatttaaacaagaaattattgagatttcatataggtaactaaactttggtaaattttaatgaaaaagattatgtaaactatagtgatattgaaacattttactttatcacaatctataaacttatctagtaacatctcatttaacaatattgattatgatggatgtttaatttacatatctttaattaatttcaaattttacatttctctatataattcattatattttaattggtttttagtaattcacttaacatagtgatgtagaaacagttatttgattacaattcaatggactttcaactcctactttttttatattataatttttgttttcttttttacccatccccgcatcttccttcgttatatatatagatatatataaaaatctactgaaatttggaaaacaaatgtgaatgggggtaaaacacatcaaatatatgtgttttatccaaattcacaaacattactaagtgcgtttaattatattttcggatttgctatctatgggagaggtgaacatactctggaaatatgatatatgtagcattgtagcaataaaattacttcaaaaagttttaactactttttgacaaattaatagtgaacatactcggatttgctaatttctcttaactactttatcgacaaattaataattaatgtatatatgtttccactttcccgcaactctatcataaagtttagtattatctcgcttggtagagtttgtccaacaaacctatgttagtttatgatgttttgatttttgtgtcaagaccagactaattataaattatgtacaattgtgagtttgtgactatgactattttttttgtcccgtcaacaaactttcaatttcaatttctatttctatttttaggttaaacttgcatgaatatgtagacatagtcaacatggctgtgtgttattgtctcacaaatgctcctcggcacccaaaagacgacgtaaaaagaacaatggcctcgatcaaacgagaagttgattcttcagcgatcaaaccgattacgttactatttgtctttttcataataagattagatgaaataatgattgacactttattattttcaaataaaaaacaaacttcctgctgagttaacaaaaaaacttcctgccaaaaattatattttagatagactaattaatatacccacaaataaacggccatgcttatcacgtgtgtattattgtatcgcatttccatggtatataaatagaaggaattcctaagcagagatatgagactcacgataagcatagtacaaagggtaataattaagagagaattaaagagggataagaagttatgggacacttcttgataggttttcttgtagttgtcttgtccgtgggaaatgttattgaagaagcaaatggtgaaatacctagaaccacattggaaaaaatagagaggatgaatcaaaagggtccttatttgggaattgtagctccaaacaactatgagcttaaccctcttctcggttctaaagcctatttcccatcttcttcgttgcctttcatcgatttcgcaggttaatattttacattgtcattcattttgatcggatgaaatcacacaatcatcaaattcctgtatatgagatatatgagatttttgtggcgtataaatagattattgacatggtccaggagattacaaaacggtcatttcttaaagctatttataatcatggttgttctatagcttaagtctgataatttctttcctcaatacttcaagataacacgatatctcaagcttcattttttttttctcccactctctcaagaaagatattcatgtgaaacctatataaatttattcatgtgaaacctatataaagtgatttgcttttattcccctctttacatcatgtaggtcgaaaatttcgatttggaaaattatcaaaccaaccagtgataatcgtgatgtcgggattaggaatggtacgttttctatatgtggaaagagtattatgtcttatcatcaaatacaaagttttttctcatatatgtgtactttaatttagggtttattaatataataataatgcataaaaacaggtgaatgcaggagtaacaacacaattactggtgagcctctttaggctgaaaggagttttgcattatggaatcgctggaaacgcagatgttaaccttgagattggcgacgtcactattcctcaatattgggcacactctggcctttggaattggcaggtataagtaacgtaggcttggttattgacttttaccaattgcaaccaattatgttaaggtttttatattaatatagatttctagaaatcaaaacaattatgatatttatatgagtatatgtttatataattgttaacgcttaaacttgtggccaggatcttaagatactatgaacaggtttagttttatcatatagtatcgtgagatctgtccaaatcgatgctttgcacatgttcaaaatatactatatatgataataacaatttaatgttagtggtacaactggttattgacaaacataattttgatagtttcacacatatcattcaataattacatttgaatattatcttgaatgtagaggtatggagatgggattgacaacgaattagctcttgaatccggcggagactatactcgggaagttggttatctccagttttccaaatatagtaaccgaaccgataacttgcttaatcgagtttggtatcaaccggaagaaatcttcccggtcaccggaactcctgaagagcggcaacatgtgttctggattcccgttgacaagtcctacttgaaacttgcacgcaaactcgaggtttgaccaaacctgcccatatctagaattgttttgttgatagtaatatatttttgcatacaagttgaatttagtttcgccgaatattcataacacgttaattagtccattacgtatcaatatatttgactaaaaaagttcaatgattattaattattaatattaatatactagattttaatcttagaactatacaggaaaattatattccctttgaaaatattagtacaaattgttgacaaacaaatagtacaaattccagtattgataaaaaatttaaagtcagtaaacataaagtgtattaaatgacacaaaaaaaagtaatttttttgttaaaactaacaaatttaatttcctcaagcttaacaattttaaaaattctacacgaaatcatgcatatagaaactcgaaaatgtagtatacgtactacacttatatatcttatagctgatcaaatattttgttttctcggcagatttctgatatattatatactcatgatcagtatcaaaataaagctcaattcttagagtcaaaggcgattagaaaagaaataaagtttaattatttggtttatgtttaattaatgcaattatattgtgtctttcgaatgtggaaacatccaaccaaaacaggacacgaagctaccgcagtgtgttaacaccacatgccttcctcgaccaccgaaggtcaccatcgttaaacgtggtatgagtgcaagtgttttcatcgacaacgcagcttaccggactttcctcaactccaagtttaacgccaccgccgttgaaatggagagcgccgccgtggctctcatttcccaccagcaaaacctccctttcatcgtcatccgtgccctctccgatctcgctggcggcggctccgacgtctccaacgaggccagcatattcagcagcctcgccgcagaaaactccgtcgatattctcgttaagttcgttgctttgttgcctccacacgaaagcaagattcaatcagaatgataaatgtggattaagactaaagagtgtggattaagagcatgtaacgggaaaagtaagatgtattatgtgtgtgacacgattagatatgtgtctaaaccaaataatgacgtacgtacttcaatgttaaacatatacatcagttttatgatgtggtaaggagtattcaataatatatcagtagtactcctctcgaattttagaaagtcgttgaaaaagtctctgacgaaaattagaaagcggttgcaagaagacttttaaaacgttacatgagcacaattctaagaaactggttatgattttctaggaaaccaaaacacttttgtgtaggttcgagtactttattcttctaattgttttcgtaaaaagaatactcgagtttaaaaccgatacaaatgttacactacgagacttaaaatagtaaaatacaactagttttgttttctgaaataccacacttaagaagacttcttgaaggcaatcaccttctcaaaatttcataatagcttacaaaatcaagtgtacgagggtttatggatactttatatgactttctgaaccttcgaaagcttttgttgaaccaataatgggcctgttttttgatactgtatgaaacaagaatgggcctgttgtttgatatggaccctagtcatagcatacgtataatccaaatgtatacactatgaataactttcatgtatataacccaaaatgtcatttaaaattggcccacaataatatattgactcttcattgtcaacacattcaaatttgaatgaaatttgcgtatgatatgtatttagttgtttttttttaaataccaatggctcaaatataaattttcttgaagggctcaagatatacatccaaaggaaaggagaagaaacatgaaactcccaagacaaaacaccaaaaacacatagctggacatcagaaaagatgacaaaagtcgaaacggtgtcgtctctaacaacggtcgatacgtgtttcaacttaaccgttgataaatccaacttttagatagaagagtgggtttttgtaatttcattttgctaataagttttttgaaatttattgagagggacaataaagttaccctttttaagactttgacttgaacgaacctgaaaatccgacacatttaactctttctctgtctcgactctctagaaaacacacatttcaattttcttctctttggtttttgagaaaatatttcgagatttacactctttttgttgtcgccgcagttgatactcactgcaagcgtctcttgtaagctcatttagagtcttcttcaccactcttcttcttcttcttctttagttccttaaacttctgggttttgagttttgttcttggactaagagaatgagtgcttcgaagttcataaaatgtgttactgttggagatggggctgttgggaagacatgtatgcttatctgttacactagcaacaagtttcctactgtgagttttctttaaaaatcgttcctttatgactctaaagctttcatttttcattgtaaagctttgattttgcttactgggtttaccttaaaagatacatctgtgttcttggagttcacaaatgggtttagcttaaagttgatttcgagtatctagggtttactctgatgtatgattcatgattcttgctggttttttcatgtctggcaggattatataccgactgtgttcgacaatttcagtgccaatgtagctgtggatggacaaatcgttaatttagggctatgggacactgccggtaaattcaaaatgtctaattttgaaaccgataagctaagaactgaaattgatgattcagagtcttctagcttttgaagctctcatttcatacatttatttgtgggtttcttgttctgttggtgtctttaggtcaagaagattacagtaggttaagaccattgagttatagaggagctgatatcttcgtcttagccttttcgcttattagcaaggcgagttacgaaaatgtactcaagaaggtaaaaatgtttcgaatcttgtactggaacagatttggatagtgaatgtggtggatgttgaaatgtgtatatgagttctgatatgattgttgtttttgacagtggatgcctgaacttcgtcggtttgcgccaaatgttcccatagttcttgttggtacaaagctaggtaagttttgttttgcagattttctgttttgaaatttctcttggctaatccattacgtcttggtgttgtttagatctccgggatgacaagggatacctcgcggatcacaccaatgtcattacctctactcaggtatatatgggtaacctcgctatttgttctgttttgaaaatgaatctttaagacttgaaaacttttctcaagcttatgactttgtggatacagggagaggaattgaggaagcaaattggtgcagctgcttatattgagtgtagttccaagactcaacaagtaagttctctgattcaagaagtaatgttttggtaaaagttttagaatcttatgatgactttgctttggatttgttgtagaatgtgaaagcagtgtttgatacagcgatcaaggtggttcttcagcctccaaggaggaaagaggtcccgaggaggaggaagaatcatagaagatccggttgctccattgcgtaagcgttttaaagattgtacttatcttcattttgtactatgtgaagagattttacaaacaagactcttaccaatttcacctctcaaaactctgcaggagtattgtctgtggaggttgcaccgctgcttaagacacaacaaaagtttcaacaacaatgtattcgtgactctctttctgtggttgttttctagttcgtaggatgaaactctccaactgtgaagataaggaaactgttggttctcttatttgtatgtgaagaagcttctttctctgtttatggttgtggatagatttgcagattctgtaacattcttgtcttgttaacaagttttggatcttttagcaaatttggaattcttatattgtgttatttttgaattttgatcatgcaataaaatcagattaaaccaaagtgaaaccaaaaagtgttaggactggaatggttgcggctgttagggcggacaaatccgtatgcgctttagaccaacttttgtttaccattcataaactatactcagcaataatgcatattgagaaaaatagaacaaattcgctctggaatcattgcagaccgcatttatgtagagaataagttgccccctgcggtgagagctcacctcttatgccactattggaaaagaaataatcactcgtgccattcttatgtttagaataatattattgatttttactaaaatcgaaaaatgaggaaatgacgaaaaacctttgcgaaaccacgaaaacttaatttgttgggctcgggcccaaagaaaaatgtaaatactcggcccagttgtattatttaccctacaaactacagaaaaaacctaagtaaaaacctaattcttcccccttttcacttctcgacttcttcctcttctctccgtcgtcgtcttctcttctctcgtctccgacgacaccaccaatttcagttcgtctttgtctctttcatatggctagagtaaaagactcatctggagaatatgaatcaacagaagaggaagccggagaaattcagcctacaaccggcgattgtgacgccgccgatttgggtaattcaaacgccgtcgcatgggaatcaaatgacgatctttcagacccaaatgccgattcttgtgcagaagaagaagaggcaacgaatgcagttgttcaacatgatgatggagcaaataaggtatgatagaagaccgttatttttttgattaggctcgttttaggatattatgcatgcattggtaaatgattggatttgtgaatggtgcttcagataaaacaagtagtacaactaggtcgtaaatttgtgaatggtcattcaggaacaagtagtacaactaggtagttaatgtgaaattgaaagtattttgaattgaatatgcaggatgatggtgatgatgataacctgccgcagaatatgcaggatggtgatgatgatcttcagccgcagaatatgcaggatgatgatgatgatgatgatgataatcaaccattgccgccagaagttatgtactttgatccaactacctacacgaaggtgtgtaagataggaacgaggtgtcagttggtacaaacagtggaatttatagagactttggatgcagaactgaagtggtttaagaatcatgaccaatttaagcacatattccacatgcctaaggagcccaatcacatgattcaaggcatgtggatgcttatggttcgcacggctaagacagaattggcgagagagtgttggtttgttgtcaatggagtacctataaggtactcaattagagagcatgcattgttgaccggtttgaactgccgtgagtacccaaaaaactataagactttaggcagtttgaagtttgttgagaagttgtttaagaggactgaggacatcaagattaaagacgtggaagagaagctggaagagtttaagagtgagaagtctactgctaggttgaagttgacaattctgttattcttagctaaggttatgaaagctgattctaaaggggattcgaagatagaggagttgcttcttaggattgtggataatgtcagagcttgtgagacattcccgtggggacgtttttcttttgagcagtgtatggaaggggtgcggagagtaatgaagaacatgaaaggtgtggtgaaacccaaggcacaaactgctttttatggatttattactccacttgaggtaagtagtcgagtaaattatatgagtggctagattttgttattgtgaacttgcatttacttttatgtttttgtgtctagattctggcatttgagtgcattccgcagcttgggaagagatttagagaagctgtacctgcagacaaggaatgtccaagaatgtgcaagcacaagttcagtgaaagttgcatgaagggatttactttggaagaaataaatgaagcacttggagatataacggttagctttgttctcttgaaatctatgtttataatctttgtggtgtttgaaatatatgtttacttgacaggatatttcaagcatcttggaacctgatatggatgagagaaaaatgttgtcacgcgttgtagagaagcatgttgatgatggtattggatatatcgatccgattgttgatagttggagagaggcttatcgtagagaaaaagaagattttctggcgtagtctctaccaagcggacattgatgtagacgtattgaaactgttgatgatgttccagctgtacctgaacctgaaatccctgggacatcgattctctcgttcaaggaagctatggagagaggatttgacaagctcacggacaagcttgctgtgatggatagcgaaatcaagcggatttgtgtgagagtacaaggaatagaggaatatgtggcagatcagcttgagaaagaggcagaaaaagacaaatatgaagatatgcgtcctggttcagctgctgattttgtgccaccgtcttatcagccaagggatactcagagcaaggccttggttattcacagtggaatccgtgacccagcacctccaactattgagtctctaagtgagtttttgttgaacttttgtgtagtgatgctttcacaatagttcttagatgtttggttacatatttttgtaggtgatggcagcgatgagtccgatgaagaggataagaagaagaagaagaagaagcagatatcgaagaagaagagaaagcatgttggtcctactctggaatctggggaaaaacgtggaaggaaaccttccaagtataagggggaagagtttacaactgaggggaagcaaacgagaaagagacagaagaattaggactttgaaaattctttcttgcttatgtgtgtgtgtggactcttaggtgtctgtcaaaataggactttctttttgtgtatttgggaatgttatgcgtagtttatgtgtagaggacaaacttattttctgaaatggtttatgtgtgttaggattttattaaaatcaaaacgtttggctaagttgtcccggttggccggtcaataatacaagagtagctaagttgtcccagttggccggtcaatacacataacttaaaatacaagagtagctaagttgtcccagttggccggtcaatacacaacttaaaatacaagagtagctaagttgacccagttagccgggacacccagagacagagtagctcgtcagctcttcaagctccttagctcgtcctcaagctcctcagttcgtcctcaaagctcctcagctcgtcttcaagctcttcccatcacagcgaccatctcctcgcctagctgtcagctagtcagctcgtccgactcctcgtctagctatcagctcatccctcaactacaaaactcatctacctcctcgcctagcggcagttcgtccattgactgcatagtccacctatctcgtcgcccagctcgtctataccttcagcagacaactcggtttgtccaattcgcctctctaccacggttcatccagctcgtccgagctcacttattctaatatgaactacgtgtggcttgatcccatttttcgtacttgtgtgattcgtgcatcaacattttcgtacacataacttaaaatacaagagtagctaagttgtcccacttggccggtcaatacacaacttaaaatacaagagtaacatatttaggttcaaatgtcatacaccatcctcaataacataaatcacatcataatcaccatgtagaaagtaatgccctaagcctatcaatctcgacttctttggcgagtaacctttctttaagggtttcaatttcgccttgcatgagatgaatagtttcccggatggactccaaagcatgattgcatgctagttgtccatgtcttagtgcggaatcaagtttgtgatttaccttctcaagctcctcagttaccgcctgatcccaccactgaataaggtggtttcgggactcgtactcttcagcctgcgaaagagagaagacttcataaatataattcacttgtactttgttgttccaatgaaatgaaaacacaataacttactttaagcattgggcatttgtagactctgtcgccttgcctgtaaccagttttgcacacttcaagttttacaggcttaccacaaaaacatttttctggaaccccccaatttgcatcggcattcgcctctccactattccaactagcttcggacgtggatggttgagagtaactatagggcatctacagaacagagaaagaaagagatatgaatcatgaacgctataaaccctagatctactaattacggcggctagaaacccgtaagaaagcctagatctactaattacggcggctagaaacccgtaagaaaccctagatctactaattacggcggctagaaaccctttagaagaagagagaagaacgagagagaggaagaactccagtgcatgtaataccttggttgtcgacagctaggcgaggagatggtcgctgtgatgggaagagcttgaagacgagctgaggagctttgaggacgatctgaggagagaagtgaagaagagagaagaacgagagaagcgaaatagaagagagagtgagaataaataggtagaaactttgtagtgtgaacgcaataatcgtagtgtgaacgcgacttcgtggggtctatttttaaaaaaatttatttattagaatattcagaatacacatagttgtatgtatatgtacagttggccggaatcacaaacagttgaactattctaaattttgtgtttttgaagttgaatctgaaaaaccaactcatttttttagttggtcccataagttttaacatattaatggattttaataagttttgatagaatcatatttagtaaatatctgttttcatacataacgtatgtacattatacaatcatgaactatatgttccttgtcatacataggtgatttattaggaaaccagtttatgatcaagtttattaataacaatgttgtaatatcatattttggatttattcaatgtttagatgttgataatagctgaaaatattgagaattataatgcaaataatatagtacatcagacttacaaataatataatgcaaatacaaatgaacttagttgtattggttgaaccctttctgcagttggccaggttgttccggttgaaccctttctgcatcagacttaatcttcctcaggctgcagccaagcctccaagtttattccaggttgcgattttctcctctttcgcgcttcaccagctgatggaaaccgcttctcttgatttcgtcctggtccttttggtgtgtattccggcggaaaggcaactaactctttaatatgggcaggaagaacccaaaccgactcatgtgggactacatacaacgtccggtaataggccaatgaccaactatctatcaagtaatacacagagcagagtccgtagatggttgtatccgcatttctcccttccttgcgggcgaggtgccttgctgcggccatagcatggacacacgggatcttgtctatatcaaaacatttgcatgaacaacttttcattttcaaatccaccagaaaacttaccgagttgagatcaatcacgttgtattcttggttgtaactgttaagctcaaacacagttaatttggctgcaacttgacatctaatgtgcaatatgttctccacagtaggcacaacttgtgctgtgattggacaagaacctgaagcttgcctatgctcgttgaaccattcagaaaacttagaaatcatcacatcaatcattggtaacaagtggtattttctcgcttttttaaacacaccattaatggactccgcagaattactagtgtcaatgttatacttgtctcctttaaaatggcacctcgaccatttctcaaaccctactttcacaagaaagtcagcagctttaggccataaacttgtaaaatgaccaaactctttctcgaactcactctcagtatatgcatgagcacaatccctgaacttgacagcagctccatccttgtcaattgtcacacgatctctcatgttttgacacaaatgccatatacaagctgcatgaagcgcattcgggtacaccgtcttgacagccttctttatgctttgatgcctatcactaataaagaccaatccgggaacatccgaatatacagttttcagcttttctaagaaccaaatccaacttacatccttctcgctatcaatgattccaaacgcaagtggataatgatgatgattaggatcttgtgctgttgcaataaccaacatcccaccatacacagttttaagatgagttgcatccacaactatcactttccgcattgccctaaaaccttcaatgcaagcgcctaatgcaatgaagaggtacttgaactttttctctccttccaactccacataagttactgtccctggatttaccttctctaacatgtaaagataagaaaataacatcgtgtagcttctttccggagtccctcgcacatcactaacatgtagcattttgcctcttaaggcagtggagtatgaacaatgcaccccaagtcttcctcttacaatcgacataatgttttttggagttggggtctctaaatttccgggataatcacaatgtaaaaccgatgctattaatcttggtgtgcctcgctgtatactgttgcttgtagtctcaacactccgagagcatgtatgcatctttctatgcactctaacactccaaaaatgagattttttagttctcgcaactcttagataccaagtacaccctttagaagcttggcggcatcgtagcataagtctcaacgggtctgacttaatagtatagactccaaaaacttctttctttgcagctctgttaaccaattcccacacagcctcccttgaacaaaattcttgaccaatttcaatacccgtaccatcatcccattctataacctgcggagtaacttctacacttcgtggaatatcgtgaatatcatcataatcaatcctatcatcctcatcttgttcctcaacagaattcaccggcctttccatcggcctttcgatagccacgatctccgtacctactacattctcacaatcattcacatcattatcatatccatcatgcaccatctcacatacttcatttaaaacatcatcctctattacatttacaccaactgaacttcgacgctccggtacagaaatttcctctctcctctcaactcctataccatttaattcctccacatgcaaaacaggaatccgactctcttcatcagattctgttaaaaatatgaagacatcctcatcatttacaatatatgtctctctcctaactttagacagattgtaactcagtttcaacttgacagaagcttcatcaatcgcaaccttcttcatgatcttgtcaactaacatcgaatagctaatcttctccaaactactcgtcttaaacgatataacatatagtgaatttttaccaatccactcattcacttcagaatagtatcctccaaagtcaaaatgtaccttagtgtggatcttcttcttcatcgctcctgaaaatacaaccagttcaactccaatcaaacattttaatagttataccacatgtactcttatcatacgttgaaatcaatctctcgtcgcactcgtctctactgaacctaattcgttacctttcaattgatttccaatgttaatacatacctattcgttaaactaattggttaatctaaactttgcaaacacaaaccccccaaatctttaatatgaaatctcggaattcaaattcaactcacattcaacctacattcctttgctcatcacctcaaataacgtttcggcaacctctaatcgattactctttactttgcaaaccaatcatcaaactatcaaattgaatcgagctgggaattatatagaattcaaaatcccaatctaaaatcacaatgcaccaatgtcaaaggaaatatgagaagaaactgacctaattcgtggcttttacgccggatttcaagtcggcggcatgaggaaatcgatggtggccgacgaagaagatgaacgtcgaccaaagaagaagaacacgacgacgaagaggagaatctccgaactcgattttctttatttagcttttgaatttctttttcatttttttaatcaactcattaagggtacaactggtatatcacattttcggtggcattcagattaacttatggcagtccagatcagttttttcaaaaaagtggcataagtgataaaagtccccccctgcggtttggtttcttgtccgctccaaaacttgtgagggcattttagtcattacaacatgggaactggatttttaaactggtgaattcgttagcgtttatgtgaataatcatccatcatcaggaaagatccgaagaaaagcgacgccgttttaaaggagatggataaacaaccggcgaccagttggagtatccatacccggccggagataatcgccaagtacgagatcttcgagcgagtcggatccggagcttacgccgacgtttacagagctcgccgtctctccgacggtctaatcgtcgcgctcaaggagattttcgattaccaatctgcgttccgggagattgacgcgctcaccatcctcaatggatctcctaatgtagttgttatgcacgaatacttctggcgtgaggaagagaacgctgtgcttgtgcttgagtttcttaggtcggatctcgctgcggtgatccgagatggtaagaggaagaagaaggtagaaggaggggatggattctcggttggggagattaagagatggatgattcagattttaaccggtgttgatgcttgtcatcggaatttgattgtacatagagatttgaagcctgggaatatgttgatttctgatgatggagttcttaagcttgctgattttggtcaggtgagattatgattgttactgattgtgttagttatttcattgtttgatgcacaaatatgagaaacctctgaatgaaaaatgcttggtttgcttgaaatttggaagagttagtgtaatcaagtggctagaccttatcatttagtgtaatctatgagtttctaaatgtgtgttggcttcttggttcatatacaggctaggatactcatggagcatgatattgtagcttcagatgaaaaccaacaagcttacaaactggaagacaaagatggagaaaccagcgaaccaccagaagttattcctgattatgagaactcacctaggcaagggtctgatggtcaggaacgggaagcgatgagtaaagacgagtacttccgacaggtggaagagctcaaggctaaacaggttgttagagatgatactgataaggactcgaatgtgcatgatggagacatatcttgccttgcaacgtgcactgttagtgaaatggatgatgatctcggtaggaactcgttttcttacgatgctgacgaagcagtggatgatacacagggtttgatgacatcttgtgtgggaacccgatggtttaggccaccagaactgctctatggatctacgatgtatgggttagaggtcgatctatggtcgcttggttgtgtgtttgcagaactcttgtctcttgagcctttgttcccaggaatttcagatattgatcagatcagcagagtgaccaatgtgctgggaaatttaaatgaagaggtctggcctggttgtgttgatcttccagactacaagtcaatctcatttgctaaagtagaatctcctcttggtattgaaggatgccttcccaaccattcaggggatgtgatatcgctgctcaagaagcttatctgttatgatccagctagtagagctactactatggagatgctgaatgacaaatatttaagtgaagagcctcttccagttccagtttcagagctctatgtgcctccgacaatgagtggaccagatgaggattctccgagaaagtggaatgattacagagaaatggattcagattcagattttgatggctttggacccatgaatgtaaagcctaccagtagtggatttacaatagaattcccctgaccttggcatttaaggtacgcagtcaaaagctctggctcgcttaaacacataaatcagtctcttctctctctctctttcttcttcaaagagaatgggtatataccaaaacctgacatgtgtttctttaggtcttgattgatgcaacactctttgttgtttgaagatcttgttacagaataccgcttagaaaattgttaacttttcgttaggacattgtttaggtatcaatggcggcaaaaacttttgaaattcgtttgctcattgatctcacaacttttttttgcgctttgtttctctcatcgatctcagttttatgtgtttatctctccttggcagagtccatggttgagcatcttgatcatcccgacttcccctgaattcgcctactttgtcaaaaatgtgttgtgtgtgtgtgtgtgttgttcctctctctctgcctccctcgtatgaaaatggtaacatttacaattggaaagtcggtgttagcctttagctattagctgaagagctagttttcttgttgcccaggccattctttaccctatttttcatctgaagtaacaatgaaacaaaatctatatatactcgagttttgctttctaggatctgtatttcttaattgtttctatattttgatcaattttgaacttttcatatcaagttatcaacatgtgtagtagcaacccttcaataatgagaccatggaataaaagcctatcctatatgtcatccagtttttgctaagataaattattttcagttacccaaattacataatcaaaactgatatcataaacaacaaaaatagcacacacaaaaatcataactgaatctgattcttccagaaatgtgaactgttgtttactataaaaagaagaaaaccagaaccacaatacatttgactccatgaatcagtcatactagtccaacatactaaatataaaacttaaggggcaatattgaaaattagacaaaagttgatagaccaaaagataaattaataacagttaccagtatctatcgccaagtctcccctagggttttttttctctgaaacggacatcgagaaattccaggagtgagttttgacaatcggagagaaatggggtcgacagaaaaagagcagacgacgcaacatcacccgcctcacatcagcagtctcgtcgtacgtccctccggaagcaacgacagagaagacggccgcaacgccgccggagactatgagcccggagaagtctctcgtgaccggccttcgtttaatcgctcggatcggtataagggtgacaatggtggttcgtatctcttctaaacattccagtcctcttttctcctgagtttctcttctcgttattggtttcgatttctgaaattgggggaatgaagaacagaactaagtaggcatcacttgtttctttcactacaaatgcttgtgattgtctacgtcttagtcaatgttttatctcctttgacttgtgattccgatgaggggaattgtgtgtagttatctcgtgagcatttggtgctatcttaaaggtttttgataatgctctcataactataacaatgctgtgtaaattgcaaatgagcattgttcttgccttgaagtacttaggtcttgatgtttacataatgcattgttttcgtaaaagatgcattatgtaatgtatctaaagagtatagtgactcttagtgcgattatacattgctacagatgcatatcaacattccctgttcagttcttagtgaattgtttggtatatgctctgagaatgctgacaccaacggacttgtaatttcacagtgtcagtgctccattttattggtctgcaaagaaaatgattttttgaactttgctgtctgctgatgtatatttgtattatactgtagttgacttagtcttgttctactggctactttttgtgtgtgtgttaggacatagaactcgggcaagttctagctcaccaggccgtcgtggatatgaagatcacaagcatggctctgatcttaatcattcaggcgttccacctcgtggccgtgagttaagcagcagaagggaagcacctgggagacacagagactattccccacccttagctagaggtggagctggtgctcgtccttatcgaagaggtttagatgggcctgaacctccacatggaagggatggcatgagcagaaataatatatcaaaggtgcaaccaagagaaggagattggtactgtcttgatccattgtaagtatccctgctattctaaatttctacaatctcaggttattctatatgaactctatagaatattggtatctcagaacctagagaagtttctaaatcccatattatgtttgttttgtcatgaatacagatgcagaaacttgaactttgcgagacgcgagtcctgctacaaatgcaagaggcatcgttatgcaccggctaatagtcctccactgcctcgccttcttcctcctcccatgaatcattccccaagaagagactttaatggctacagatctcctccgcgtggctggcccagagactacccgccgccaaggcatgaccatcccacatggagagacagagaacgagaccgtccgcattactcagaccatgagtaccctcctagcagaaggatagcatctgactgggcccatacagagccgctcccaaaacctcattatgacagacgaccacctctcagtccacctcgtggtggcagatggggacgagttttgagagagaggagcagatccccgccattgagagatgttccaccaccgccattgagagatggtccaccaccgtcattgagaggaggcggtccaccgctgcacagagattaccgccgtgacagtcactttgacagagaaagacgagacgatgggcgtggcggcagaggcagaatgggaaactcttactgatgcaaaaactgtgtatgtcttgggattttggtttagacagttcaaattttcgcggaatgtgaccttgtattacaccttagattctttgttcttgttagcaaaactcttgtgccattagtgcaaaaaccaaacaaatgagaagcaattttggtgctctttcgtaattaaagaaacatttagggccgaaacaaaaaatatacttcttcttaatattccccttccgtttcggcttccgcttgagaaggtgcgtactatgagttcacgagtggtctatctacgtgtcagttttttattgggtgatagctaaatacacgcatattaaaagggctttttggatatttgcttcaccgtagatcggacggtggaaagagacaaaacctaaagcatttatgaattgacatcgttggatcatcgtatttaacaagaaccgtacgatgagattgccacgcaaatctaaccgtcgaatataatccagaaaattgaaatttcaaaacatgttagagagagggaggaggagagatggtgtgagagaagaagaagaacaaaaccgaaagtatttttttgtgcttttaatttttgtttttaattttaccaaattcctctgagggcttcttcttcttcttctccgtcttcttcttcttcttcttcttcgtttagagctaaaacccaatagaaccctaattctcatctcccttaaagcttatcccttttctctctctatatatatacgcggatcaaattcaaagtctcagtttttgagctttcttaacagccgccgaatcgatttgtgattttcccgctccggagagattcggatctggatttttcgagctgatttgtaggaatttctcgttttctcgcggtgaattatatcaactgtggaaaaaaggaaaatttctgggtttttttggttttggagattggaaaatctttgagagatgggtgaagacggcggaggaggcgaattcccgccaaaaaaggacggtgttgaagagggttttccgacgaagaagccagcaaggcagctcgacttcactggtggctccgatgaacattcactgtctaaaccagcggctcctaccgtcgtagctacgtcggtgaaacccatcattagtagctctgtcccttcgacgatacggccgggtatgaccatagcaatcggtcaggttactcaggtacgaccgacgttaccaatggcgacgacgatgtcaaatccgccgtcacagtcacaaatcgttaacgcgccaattaggcatccgtaagtttttatctatcgattgaaaaattcaaactttttgtgttatcttaactcaattgagtttgtacaaatttgattggggatgatgaaattggtttaaagtttaatccttttagactaattggtgaaactaatttaaaatggatgatgaaaatttcaaaattttcttctctctttttatacaggataccggaatctccaaaagctagaggtccaaggcctaatgtggaaggtagagatggaacccctcaaaagaagaagcagtgtaactgtaaacactcacgctgcttgaaattgtaagtcttcccattcttgtgttagaaattgacactcatcaaattttgttatgttgtagtttatttagtttcctggtgacttgtttgtatgattgcatgttcatatcttttccttttcttctgctgcatgtctaagaaactcaaaagtctgattttttaagtttaccaatttttgttgttaattgtggatttctgcactatcttgtcaggtactgtgaatgctttgcatccggaacatattgtgacggttgtaactgtgtaaattgtttcaacaatgttgataatgaacctgctagacgagaagctgtggaagcaactctggagcggaatccatttgcgttcaggcctaaaattgctagcagtccacatggtgggcgggataaaagggtacgtggtcctgaggaacttgttctagatcgtgggagagttctttaagcttctaagttattgttgatttgcctttgtaggaggatatcggtgaagttgtgttgttagggaaacataacaaaggatgccactgcaaaaaatcaggatgccttaagaagtattgcgagtgctttcaagcaaatattctttgttccgagaactgcaaatgcttggattgcaagaactttgaaggaagtgaagagagacaagctttgtttcacggtgaacattccaaccacatggcttatcttcaacaagcagcaaatgcagccattactggagctgttggttcctccggctttgctccttctccagcacctaagagaaggaaaggtcaagagattttgttcaaccaagcaattaaagattcatctaggcttagccactttccacaggttccaatttaccattttagcatatatatgctttttggtaaccatttatagaactgaaaaatatatttttctcttgctgttggcttagtgaagtgaaatcttattatttgtatttaggtaaataatggaagaactggtggaccaacctcaggcacatctccatcacctgtttctcgtgctggtggcaatgcatcgtcagttccatcaaagtttgtatacaggtgaaatttctggtgttcacaagttatttagtttgatccaagagctgtctaaaactgacttgtacgttgtaattttttgaaggtcccttttagcagatataatccaaccacatgatgtgagagcactttgctctgttttagtcactgtagccggagaagcagcaaagacatcaacaggtgagactttggttaaaactctgtattgatgaggttttagctctatatgtacaattcactgatcttcctttaaaatcttctcagataaaagaaatgaaatagaaaatcgggtggacgatcaaacagaaacttctttagcttcttctgcacaagatcagcctcaaggcaataacaatgcagctgatgtggagatggttgcaactgatcataatcaagctgataagtctggaccagaggaatccaattcagatggtgttgatgcctctaaagtgaccccgctatctccagcaactttggctttgatgtgcgatgaacaagacactatcttcatggtggctgcaccttcacctaatggctcagtcgatcccaatggctgcagaccaaactcacagggccagtcagaaatttacgcagagcaggagagactggtgttaaccaaattcagagactgccttaatcgacttatctcttacgcagaaataaaaggtaaaaattccgtgtttcacacacatttcatcaaaagtctttcgtctctaaagttagttaagttcgttggattgcagaatcaaagtgtttatctttagcaagaatgcacatacagccacctgcaatcgcgactgtaaaaaccgagaatgggattcaacagcaagtaccaattgtgaatggagcttcgcgaaccaattgtcaacctacactcaacaaaccgcagcctatgcagctgatgaacacaacatcagcagcaccagcaacagcaacaaacactcaacatcttcaaaaacctccagctttatcagagaagaaagacccctgaatcagatagattattatactctacttaggacagaaaataacttaccagagagagcacgctgaaatctgcctcaccaccgccctatattatcaggtaatcccaccgtaatttttctttctcagtggcggttgttgcggcttcaacgcattggcaggtgattagagagagtaatagacacaagcttttattgtgtcgttaagctttcttctcacttttctctttcttttcttataaagtctcctctttaaagccccttgtggctggtgtagattttggtgagctttgtttctttactacacgaattttttgttagttttttttttgtgttcagtatcactttttatgttgatggtttagctgtggaacacccttgtttactgtgtcggattatgatctgagatgtttctcaatcagcttctgtaggatttgaaagtaatatataataaatccttaatttgattataaaaaaaaagatgtaaatttcttcatatttttctctctggctagaacaaatcataactttatgaaactgacgtcactacaaacatttattaagagcagaaaattgtttattttaagagtgttaacaacaaccacaccttaatagcattttaactttgaactttgaaacaacaagagagactgatttattttcatttagtgactaacaccttcagcctctccttctgcatatacttaattaaacgcttcacaatttggacctcgacgatttcgattcactctgcagccaaaaccagaattttcatcatgaataaatcgactatacactgactagtactgcattcatacgcttggaaacatttccatcatagagatctagttattatcataaattgtttactcaaaacttcatttttactagccaaactacaaaacaattctacatagttcatgccatacttgaacccaaaatctaatgttagcaggtcccttgcagcagatgaatcaacctaaattctattctcatatcgtttatcgatttgttaataagagaacttggttggtactgtgttttcttgccacatcataaaatgtaaaagaaagttgagaaactttaccaaaagcattccattcattgctctttcctccagatacctcgatggtttgaaaaagctgccataagtctccgacaatttcttgagcctctcatatatgtactttggtccaacagtgtctgcccagaaaacaattcctcccctgcaacaggtaaaaaaaattgcttaacataagaaatgatcatacaccaaaaatcttagtgactaacaaaagaaaggaaaaagttttgaggatattgtgaacgtttgtaaatgaccagaagaaactcaaagatgtgaaaaaatcatatgcataagatttgagcagaggtaatgcatttccagaatttcacaaaatgctcccttttgctttatggggattatgacttagaatcctcaccggtaagaaggaaaactcattccaaggacagacgcaatgtccaagtctgaggctcggatcacaactccttcatctaggacgcggcatgcctcgttgacaacagggaataagatcatctctacaatttctttatcagttactgatataggctgcaaaagaagaacagacaatagtgcatttcatttttttaaataccaatagtagtactgatatatttcataagacctcctctttttttaccttcccaccaggcatgatattggtcagtttccttgatttctcaacaattgaaagcactgatggatcaggttttggtttgcttcccttttcgtatatatagtatcctcttccgttgatttttcctgaagccagaaatgttaaaagtggacacattaggaatttcaaaaggtaagagcaatgacataccatttcgcccgctcttaagaagaagctctgtcattggagatctgaacatgcggtcaccatagaccttggcatatatcggcccaactgctaatccaatcccgtgtccagccaaatcaccaagcctgagaagtgagtcatcgaaaaaaaaaaaattcttcagttgctgagatagccatagagcaacactgagagtaacacatacacatacggacacacatacactgtaggtaacaaaatatagagggagagacttactggaaagggcccaatggcaagccgaaagaggtaataacgctgtcaattctgaacaagtcaacacctagattggccaacatatgtgcagcttgtgaataaggaaagaatgtcctattcactgcaaagcctatgcagtttccaaccaccacgggaactttctttatggcctttccaaccgccatgagatccagaatcacctgagcagaagtattctttgaacgaacaatctcgagaaggggcatcagatgggccggactataaaaagacaaaccatttgtatattacactaaaaatacgaaaaaagcataaaaattttgaggcattggaaacgcagaatgacctgaagaaatgtgcgccaacaatgcgatcttttgagttagtcttttcaccaattacatcgaggtcgatagtagatgtattactcgccaaaatgcagtggggtgaacaaaccttttcgatttctttgaatatgttttgtttcaattgaatgttttcaatcactgcctgcaaaatgataccaggagcaaggccttacagtaagaagacataaatacgagttgtccctctcttcgaattatctagatttgtatatacttgaaagttgaaacaaaaaagaacgacatataacaccaaagtagataactaaaattgaaggcagacctctatgaccatgtccacatcattgaattctgtgtaatcaagtactcccttgaacaaagagagggcctttcctgctttatcttgtgtcagtttccccctagataccaagcttttcatatttgctgtcacaagaaaaaaaacgaactttattgcatctactcactgtaacaggaatagtaataatcatatattttattattccatcatattcaatggatacttcgtttggcttcaaacaactcactgaagtgtttgtacacttttctaatttcttagggctgcaaactactatataacacttcatctaagagaacctttttattatgcaaccaatttttatgaagaacgattttgggctgacaacgtagataacagttcaaatttttggtatttgaccaagatagatacttctataaaatagcaactggatatgttatggataagataataaccttcaactgattttattcccttcataaggaattctgagtttatttctttgagcacaactcttatattgcttagaagtagagccgtagcgatgcctgaacccatcagaccgccaccaataactgcaactttttttatcggccttggtttcaatccaacgtcagttacattaggcacctgaaaagtgttttaagagatgctcaggatgaacactgaaagtgaaaactagaagtgctagaagaaacaaacacaacatatgccaatctcacttttgatgttgcacgttgtgcaaagaaaacatgaacaagaccctttgcagtgtctgacagtactagttgcttgaaaacttctgcttcctgcgaatcaaagagtttaggtacatagccaactagacaattaccgcaagtaatcaatgcaaggaatggacagattttgtgaaatgaagcactcatgattccctaatttaaaaagtcgaatgagcaccaacgagcagtaaatgatctatgtcaaagctattgaagaaatacggtaaacgtcgaaatcctaaagataccttgagaaccccactgtatcctccatggatgattccttcttcaatcacctcaatgcaagcatggtgctgaggcatatttggggcaatcttcttggctagctgtcttgaattcttcaatatagcacgagcttcagataaagaaccaattttgtcggttctgtgcagtgactgcagaaagggtttacgtccctctgcaatgtctagagcccactttctggatgtgctcaacacatctccaggtggcaccaaggcatcaatgagacccagtttgtgcccctcttctgaggatattgacttagaaagctaccgaaataccagcatatagtttaatacaattttcagcgaagcaaatcatattgacgcaaacttggtaataaaactgttggtaactgcagaaaatgtcatccttaccagtatcatatccgttgcttttgcaaggcctactaaccttggaagacgttgggttccttcatagacacaattagctcaattatatacatatctattaataaagaaaacctagccaaaaaaagtatcgccttcatttaaaagaagacgtagctgaaaaaacaaacccatacctccaaaaccaggaatcactccaagagtcagttctggtaagcctaattgagctttcggagcagcaactctggcatgacacgcctaaagaatttcgagttacagaaaaatcaacacaaaaagttaagaatatcaaaacacactttaaaacgcacaaaagggaaagaaactcaaaactcccaccattgcaagttccaaaccaccaccaagagctaatccttcaactgcagcaacaaccggcttcctggagtctgtgataaccgaataacaacaccaacatcagcatcacatcatttgatagttgcagtgcaacttacatgtgatagttgcagtccaacttattgagaaatacatcaaccctgaaagaacaaaaaatctgaaactaaaaagaagctaaataccttccatcaggttacacacaagctcaacagatacttcaggcataagcgataaatcccctgccaagaaacaagagtctcaaaacccataacaccaatttgattcactatataaataagtactaacaacagaagaaactttaccagtcttatgaacttgctgaaagacattgatatcaaaaccacccgaaaatcttccattgttccctgaagtgataaacaaattcaagctccttaagcaacaacaacgataagaaaaaggattaaactttcaaaccccttcaatacattaatttacaatttcacaatcgctagctacaagatcgaatacaatccttcaaaacaaaagtttaccgatcaacacgatggccttaacatcattcctttgattggcgtcacgaaacttctccttcaacccagaaataactgagaattcacacaaccaaacaagatcaaatcagcttaaaccaaaccaattccagataaaaaaatcgtgcatgatctaatcaatcacagagaaacatttaagcttttttaatacttggactggctaaagagttaacaggagggttagaaatggtgatgacagcaacaccatcgttcccaacttccatcgttactccaatcttcttcgccatagcttaatttctctctgatgagattgaaaaatgaaagctttattattcggtgagtgacaaaattggataaagatctggttttgtgataaaaatggggcctttgataaatcaggagtttacatttgtaacgtgatcgatatttctttcctaacttgttgtttcgtcattttcgtcataagcaaccaaatcttctggtcaacaaggccgcattcatatttgtttggggcctgtccagctagttaatattcaactatatgaatcccgattgataaacatagagcggtaacaaaataatttagaagataacatcacaagttgagagttcctttttagatattggtttagtagttaccaaattcaaaatcgttaactctcaacttataccggttcagtttaaacttcgaacccacaaatattgggcttcttaatacatttttgtgatttgcaggccaatagtggactacaacgacaagtatattgagccatgtacgggcccatcttcttaattcaattattacaacaacaacaaaaaataaataaaaaaactcactttattaaagtaaaagataaatcacaaaatacgacaaaaaaaataaaaaaaaaatcacaaaatattataatgatttataatttttctttaaaaaaataagtttgtgctataaaataataattaaacattatattgacaagtaagtgttaagaaaaaaaaaacattatattgacaagtaattaaaataaaatattcgcagccaataagaaccaaacctaacattatagttaatggagtaatttttattcagacgattaagatcgtatacaatagttaatgtacccttactttcagcaaatctaagcccgaacaaaaccaaggatgtgaacaaatatatctataagcgtttgtggttttctccgaataatgctatataatgtaccatgacaaatataattatatgaaaatgtccactaacatttgttggtttgaaaatttatagttttgtatattcagtacttagtatatataagatccacaatcttttgttttctgttaaacgatttcagcctaatgatttgacaaatgactaaaatagtttcaaataatttgaatcgatagcaaattattgtagattaaattcggttttagtccgataccatttgctgccaacacatcaaagactaaactatcaagatcaaatgatcaaccattaagtatgctattctcttagctgtaccacagtagaaatgtaaagtcattttaaattgaagcttcatacttataacttacgagtattaatcacaagagaagagagagagactatatagtctatagtatatgatttttttttttacacagtctatagtatattaatatgttttgatatgaagacaaaacagcattgaagaggtgaaataactgaactacaagaaaggcccaacgaacaacttattttcactggcttcagctgtcattcttaatatctcagagagatacataatgccttggatagaataatattgcttctgttcgaaatctcgtgatcatttaattttcagtgacaatttattttccaggttttagggtgtttatagttcagtatcgtcaataaatgactaaaaactctaatctttgaactagctagtaccatttaaagttgcaatgtttaatatgaattcgcgatttgtaaaaattatatgggtcttagttgtttcttattttgcttagaagttaaaactgtgtatttcaaaaccgacactatatataaactctaaacaagattgtaattgtttgatctcttatgtatcaaagaacaaatttgacatagatcaatttttacttaatacatctactcgactattgtataactcaaataaaaatatcattactcttgcctcctacccaaaacacatctgatttgtcatcctcaccttcttcctgagtaaacaatttccttaagaaacgcaactaatcaccaattaacttacgagcttcgagttttgtattaatattacttattacatcatcatttctcgagaaatactgtttactttatggatttgaaagatttttttaatcttccatattaatctttttgtctcccaacctgtcaatttaatgcatttacatgttctactaactttggcctttgggcgcagccacatgctctgcatgctctcatttattgcacttgtagtgtatacatatatgtacattaataaggtgctatttatacttaacattttcggtttatttctttactttttgtcaaaaagtttatagagttttggattatgagaactgattttaagcattttaatttgaggtatactctgcgtacgtaaactgacggaaaatacgtttgtatatcaatatggagaaacaaaatgtgagtcgagtcttttggtgtgtaaattcccatgagcgccatttttttacttcaccaaaaatagtgaggcaagaaaatgaactttacacttgaactttacatctcttaactctaatttttttatttgacaagaaaaaacatacgatcaaaattgcatggaaaaacgttaattaatctcattataatctccagtccattttataaccctcctacctaccacaaagaatccatcgacgaaatagagtatccgatgaattaatccatatctatgccaggaaattaccgaaacaattatagacatatagaagaagatagaacattacaacatgcatatatcatgtcaaaagtaacttctaactaatatcagtgatttacaagagaacaaaatggatttttttttatgtatacataagagaagtaaattgtaactcttgacgtggagggatctgcatcgaacatataggtgatgagatggtccaacattcatttataacttatccatctgtcactctataaccctaattttaacccttcactcttctatataaatctcccccaagtacttaacactcttcactactctctccactaaacaaaaacactagagttaagttacatatagagtaaggaagagatggcagttaggtgtttagccgtgttcctcgttgctctcatggtgtctcaagcagtcaccgcaacaagaccggctccaaccaagaatgtcggagctggtcttgacgaccaaaagaactttgtagcgttcgctggtgtcggtggagctgctggaattggtggagccggtggtgttggagctggtcttggtggtgtcgccggtggagttggtggtgttgccggagttttgcctgttggcggtgtaggcggcggaattggtggtctaggcggtggtgtaggtggtcttggcggtctaggtggtctaggtggtggttcaggtcttggtcatggagtaggtggaattggtggtgaccctggtattggtagtggtatcggtggactcggcggtgcaggtggtctaggcggtataggcggtgttggtggtttgggtggaattggcggtggaagcgattgcggtggcgtaattcctcaccattgatgttaaacgtttttttttttgtttttttgctctctataaaccaaagatcggtcgaaaggttcataattattatgttttaagttcttttatcgatgtttatgttttaagtcgtttgttttctatatatgtttcttgttttgtttgttatgctgtttgttattaattacttgtgagaaacttgtgttatcaataaatagtgtttttttttgtttcatgttacttgcttgtgttccaagatattcaattagttgaaatttgcatgcagcaatgtatacgtcaaacttaatcccatttgtaaaagttgtcagaaaaacaaaatcttctttcgtcgtgattgttataatgtagagaaaaacagaaatattagctttgtagattaaccaagcaccattatgaacgattttcttttgccgaccattataaacgaaattaggttaacaaaactaatcctatacgtcaaagtgttatatttaagcagtttaatacatgttgacagtgcaccacaaatattgttaaagtttcgactttcaatactgaattttatttaaacagtttcaaagaaagataaaataaaaactgcaatactgtttcagtatcacattctcgaaaatcgtcggtgtagtattctataatgtattgtttatgagtttatctgttttgtaaaagggtctatacggtggaagttcaaactatacatgcatggcccatgaaacatggattacaattattacatgaatgcagtataaatatattactatattcgtataatcgtatcggtgtatattgatatattgtatatttttatttagtcgacatgttgacaaagaaaactttattgacatatatataatgtaagaaatactggtctagtactgtctgtttttgaaaaaacaaataagggcctagctatcttaaattgtaaatttgccactttcacgttgggaaaccatttccaatattgtaaaagcttataattaatgttttctttttagttctaacaaaagtctccaaggttttcttcaaaggtataaattaataaaagtaaaatgaaatattaaaacaaaattaagataaaataatatttccgctgaacattgtttgtaactgaatttatctttttcgggatttattaaaaatcacctaaagactatcttaaagtagtaggcacggttctgtatgtaaccattggattttatttccatgactgatagaaatttagttacaactaccaacagtaatagccaataggtaaatgtgtagttccaaaagagaagcctctttggaagcttaatttagatctcaacgaacgaattacacttactaacatcataatggaagtgtcacagtatttagaaagttcaacaatttctttgtaagaaaggatttttgtttttaattattataaacaacaaaaagcctgtgaaatttttgtgaatcatcaaactctattatgcaccaacaaaattagaactattaccattctaatatatcgtttaacgttttaacaacataaattgttttgtttgaccagctcaacaacttgttatactccagcaggagcggaacgttagttaccgtgtcacaaccatttatttttctgaaagtaaatagaaacttaaagttgatatcagagcgtttggttatagcatttacaattggcattaactatctacaccggtcgattttattgtatgtggcctttcttggcctttaaaaggacccaacatatctcccagattttgggcaaggcaacaaacataatcaacttaaatcttatctactttctatttctttttaatcaaaattaccgttcttaactatggcgaagtggtttttcactatcttcttggtttttgccctagcctcagctttagcttgtggcgcaagaaacgtcccagtaggcctctctgaccaaaagaactacctcggatatggtggcggatattccggcgttggagacaatggtttaccctttggtggcgtcggtggaggtgtgtctggtcccggaggtaatcttggttatgggggatttggtggtgctggtggcggcttaggcggtggtttgggcggtggagcaggcagtggattaggcggtggcttaggtggtggaagtggaattggtgccggaaccagtggaggaagtaccggaggagttcatttcccttgagttgttactttggtttttaaggcgtcatacggtccttattaagctaggtctagcttaagatgatgtcataataataatttatcatatctctttagggttttaaactttggtattatgaattatcattagctgtttaacgtgcgtcttaagttactattttaacgtatgtttgaatcagtctagtggcttgtcgtgtcatggcttggtccattttcaaattctactttgaccttttcgagtgtttcactaaatgagttaatgcaacatctatgaacttttcaatattattataagctctatttatagactttatagtatatataagctctctacataaatgtgtttcgaacctacctcgaagcttgagttaattaaaagttcgactaaaatacaaaggaaataagtttaagaaacaaatgattgacgggaaaaataaaaaagaagcaaatgactaaactaattaaaaacaaattaattaaactgtttcaacccattaagaaattgaggtttgtcgtaatacatatgacatttgatagatgtaagtaagaagtaataaaattaacaagaaatgaaactaataagaaacaaaacaaacaaaaacaatatagtatactatttatcagactgttaacttacttacatagcattttttacttgaaaattttacgattgtgtaattataataaaattttcgagaaaattaatccaaaggtgttgagggtggttaggtgaaaatagtaaagtcgaaataagtgagttccaatttaaaaggaaacaaacagtcaaactttatatttattgcagaacatagcaattcaaaatactgttcgtgaggtaggttttgtgcatttacttctctcttgaatacaaatgtgtggtctgggagtacataacaaaccctgggtcaggtgaaaactattcctgcgatatataaattcgactaatcaatttcatagagaattacgattttatatggtttcacatagatttaacaaaaatatttatcagaaaacattttaaagtgtacgattatatccatatacattcaaacattttaaagtttgtgattatatatacaaacatgatttcatcaattccatttgttaatatgttcttataatggtctacattgcgtttaaactatatatcaaaatgcatttgctatcggatcaagttttttgtttttgttttgcattcataaagttctcataatttactaatatattatagaaaaacatatttgctacattttaatttgttgaatatagtctaacacccataaatttatatcttaaacatgtgttatagaaggttttaccaaacaagcacatgtttcttttatggagtctggataccatttgatgcatttcccccctagaaattgtgattcaatgcatgtttggttgcagttcgcaatcttcgaacaaggacctatcggaattagtttactcctatcttcagcttccgcaagatctgtgtttatattttggaaaacaaattagtatatgatataaaaacatacattaaaacataagtctcttttggtttgtaaaaatacaatattccaatgtcttgtaacaaaaatccgtatatcacatgttcaactatatcaatggagaatttatttaatatttgcatacatggagtcaagagagcagccaaacacaagaacacaaagaaaagacatttgcttgatgaagtcattttgatttattttttttttttttttttttttttttgtgtgtgtgttttcctgcttatgaaatagaatagttcaaaaccttgcactatataaatatagagtagtttactatatatcgtttctcagaaattcagaatatatggattaatgtttatttatatgctatatatgataggatatgttattgactgagagtcattatattctataactttgattatttgttatggttatttttttcctggtcaacttctcttttgttttaaaatttaatttaattgataattttgtttaggtaagtagtttatgaagagacaaactgaatacaatatattttggaaaaaaatactgcaaataaagagcattaatttcgttacagtttgttactattgcatttcaacgaatccaatatattgttattaatttcaataacgtaacgtaaaactctgaatactttaccagctacttttatatagttaacaaaaaagtatgccaatactgtatatataactttagtttaagtaaaactaggttaatgaaagaaacagttactttaacatatttattactttatacattaaatttattcgattatagatttcaaattatagtactgttcataatcacaatctaaaccacaatattaaaaaaaaaaaaaatcacataataaactcaaaactaatactagcttacaccacagtataaattagaatttttttatttttaatatattatcacacaaccatctagtttcatcatttaatgtgaccaacctttcagcttcaattctaattaacctatgatcacgtaaatgatttgcagcatgactcttcattaatgcgatgtaataatatcaaaattaccgtttcactttcccactataaaaagaagtaacaataaaaattcttcctaaagtttttgcttgcccggaaaaaaaatgaattacatcaaacaatttatcttggcaatttgcttttatctagtcttaacatgtcaagatcatgttttagcccgcgacaccaccacgagagacatcgtagtcccgaagatttccgagtggcaagttacggttgctaacggtttgaccactggtgaaactcttttcatccattgtaagtctaaggaaaacgatctaggtgatattaacctgaagttcttagatagattttcttggaattttggagaaaatatgcttcactcaactttgttttggtgctatatgagcaaagatgatggtcatatgaatgtaaaagtgttttgggatgatgttattctatttcatagatgtgattggaagaattgtgtttggaccgcaaagaatgatggcctttatctttggaattctgcaatcggtgaagatgtactgtcggagaaatggaaatctggatggtgaaaacatatttttgatttgttggtaattttttaactattatatgtatctgttaattttggcaggcaaaaaaaactgaagtaatactttacttttgtcataaattctctcttatttttttgtatttttcatcgaagatttttgttttcttcgatcgtgtcttggattcaattgtttttggactgttcaagacaatggtttgctgctttataatccacctcatcatagaggttttagattgatatataaaggggattcaccatgattcaattcattgttgaagtcgagagatctttgaaagtttattcgagtataatccatattaaagaaaattcaaccatgtattttgatcacgatatactaataattaattatcagtatgagattttatgtatttgttatttatgggggactcatgggtcaatcatttctaagaaagtatggatcatggattcgttttcgttcaacttatttatgaccatatatacaagtactaatggtgacactagaatacattgtatgacaatagtctcttgaaaacaaagtcaaagcattaaatatagagatcggagtcaacaatttagagtttatagaattaaaaggaaaggaggataagaagaagaagaagaagaaaaacttagcaaatatatgaacaaatatataaagacattgtaacacatttacctctgacataagtttttttacatttgacaagaaagattttagaaaaatgggaaaatctttgctaagtttatttgttatcctcctttcgtttgattctataaactcttatttgatgcctcctctcttcagaaaattcaatgtccaaatagtaaatcaacttgagtttcacaagatactgaaagttcattgcaagagcaaatctcacaatttcccaatcacatatcttaaaattggtgaaagttttcagtttaaatttaaaatttatccaaaaactcagtattggtgtaatttatggcaggtgagaaaacacatttttaacttttttatacatttctttacatattgtcatgtataaaaattaagatgagtatcagtgattgtactataaatttttgaccaactttttatttcatctttgtttgttatagggaccaaattacaaacaccatgtggtttttgatgcgtttcgtccagacaaagattttatagatggtacatgtactggtatgcatcctaatgtatgtagatggactgcaaaagaagaaggagtctatgtccgcaacaaaaagttcgaaggagaatatttcatgtatacatgggatggtccatcaaaacttggaaacatctctccagtgtctgcacctacaagtgaatcagaattggactcatcagtctaaccccacatagatctaaaaaaaattatatcatgatgtataatctttggtatcaataattgtatgttggtttcaattacaagcccaactattgtttgggcctaatatttatatatgggccttagtcaaagattaaaaaaaaaacatttcttcttcccaaagccagaaaatatcagtacaagagtacaagagagaaagaaaggaacctcgaactcagagaaattgagagaagagagaagaatcatgggacaaggaccatcgggaggattgaatcggcaaggagatcggaaacctgatggtggagataagaaagagaagaagtttgagccggcggcaccaccggctcgtgtagggaggaagcaaaggaagcagaaagggccagaggcggcggcgagacttccgacggtgactccgtctactaagtgtaagctccggttactgaaattggaacggatcaaggattatttgttgatggaggaagagtttgtggcgaatcaagagaggttgaaacctcaggaagagaaagctgaggaagatagatctaaggttgatgatcttcgtggtacacctatgagtgttgggaatttggaagagttgattgatgagaatcacgctattgtttcttcttctgttggacctgagtactacgttgggattttgtccttcgttgataaagatcagcttgaacctggatgttcgattttgatgcataataaggtatgtgaaattagggtttaagaatcttgtttttgttgtgattacgattgtgtgttgttgtggatttagggttgctgatttgttttatgttaggttctctctgttgttgggattctacaagatgaagtggatccaatggtgtctgtgatgaaagttgagaaagctcctttggagtcatatgctgatattggaggtttagaagctcagattcaggagattaaggaagctgttgagcttcctttgactcatcctgagttgtatgaagatattggtattaaaccaccaaagggtgtaattttgtatggtgagcctggaactgggaagacattgcttgctaaggtttgtctttgtacctagaatctaatgagtattagtgtttgtttgcagtatagcttagtttactacttaacttgtcaattacattcagttaatcgtttgttcggtcaaaggccagacctttgttgtgctgctggtcacctagatttcatacgtttgaacatagcgagaaatttgttctcatggataagaatcttttgagtcacttgtttctattaatgtcttcctttctcgtttctctctgtcacaagcatgagatagttgcaatttggtggtgttatctaatgggaataagctctctaacttgatcttattttaggcggttgcgaattcaacatcagctactttcttgagagttgttggtagtgagctgattcagaagtatttgggagatggtcctaagcttgtgagagaacttttcagagttgctgatgacctttcaccatcaatcgtcttcatagatgagattgatgctgttggtaccaagcggtaagttaaactattttcataaacctgatctataacccattgataatggttatctgattacttgttgtttgaaagaacaggtatgacgctcactcaggaggtgaacgtgagatccaaagaactatgttggaacttctgaaccagcttgatggatttgattcaagaggagatgttaaggtcatccttgcaacaaacagaatcgagagtcttgacccagcactgcttcgacctggacggattgataggaaaatcgagttccctctcccagatatcaaaacaagaagacgtatcttccaggtaatatataattctactgagatggcaaatcaatgacttgttcgaaactttcttgttcattgaggttgtgggttctgtttataaaatagatacacacatcgaagatgactctctcggaagatgtaaacctcgaagagtttgtgatgacgaaagacgagttctcaggagctgatataaaggctatatgcactgaggctggtctactagctctcagggagcgtcgtatgaaggtagagactcttaaccatttagttcaagcacatacaaacacacacacacacaccacttgggcaattactagccactgacgctaatgtgtttaaattggatttgttcaggtgacacatcctgatttcaagaaagcaaaggagaaggttatgttcaagaagaaagaaggcgtccctgaaggcctctacatgtaaaattataatcatatcgtcatcatcggctttcctcctccacactttgttataatacttttgcttctgcttaggatctttctggtcatataaattgatcatgttttctgatctcctccggtaaaacaattcctcatttccatttaggatgtctatttcgcattaaacttaaccaactgaaaccaagcccaaataaaaaaactgatcttgtcacagaatgtgaggacaaaaaaaaaacaaaaaaaaattctctcttccttggcataaccaactcttcaaactctctctatcctggatgcttcacacaaatttgtggagcgcttgaaaaattgtttcataaaaatagttgtctatatttaatttcggtaatctattgtgcaaacatcggctaaatagtaattacacaggttcttttaagttttaacaaatcgaaacttacttcataatgtgaagagaggagataattcaaaagttactaagtgtcgcttagcgcccatgcgagacaaatggttctgtaaacgtcaatgtagccaccgaacagggctctgcaagggactcagctgcttcaccgaagccttcaatggctccaacgttctccctagctttcacaatgtcaaacaagttgtttggtagctgagccacaccgtccaagaactggatgacgctcgacatgcttggtctgacggctgcaaccggatgcgaacagaacaagccgagcttcagaaccagtgctacttgctcctcaaggtacttatcatcctgctttaccctctcatcaaccacttgcaatatgtcatcttcccaacaatctagcacccaatccgtaagaaccatctcgctcggcgaagatgctcgtggcaagacgggtcttcgcccgcaagtaatctctaacattagtattccaaacgcgaatacatcagaacttgtgcttgccttccctgttcttgaaagctctggtgagatgtatccaaacgtaccagccacgttagaggtttgaggatcaaacccgtgttcacagagctttgcgagaccaaaatcaccgagctttccgttcatagaatcatcaagaagaacgtttgctggcttaatgtctctgtgaataatgacttgaacccactggtggtgtaaatagcagagaccagaagcaacatctttgatgatcttgaatctttgtgaccaatcaagactctgttctggttggtggtagagaaacttatcaagactgccttttggcatacagtcgtaaaccaaatagagttctcctttgcgcctacagtagccaagaagccgaactagattaggatgtctgagacgcccaatggtcgcgatctctgccacaaactctctcattccttgtcttgaatcatgagaaactttcttcaccgcgatgtccatgttagacgtcgataatgtacctttatatacttttccaaaccctcctttaccaagaagctcgctgttcctgaaaccctttgtggcaatgtaaagatccttgtaagcaaacctatgtggaccaaactgaacctcccagtcttcaagaacttccattaacttcttccttttcaagaaaagcatatagcttatggtcaagaagacgaggatggcgaggctggttaaactcaaactaatagccaagatctttttcacacttgtactccgagagtctctaggaagttttggaagacgagaaatatctatatttgaagctgtcccattgagcttgaaggtccaaccaagaatatagtgagatgaacgaagacggcctgtggctgaagtgaagccaacatacatagagtcgaaaagatatggagataaatctttggttagagaaagcaatggaatctttggcttagggagatgaataggatggattgtgacgttaagttgtctccttgaggaatcatattcaatccaggcttgtataggtttttgatttatgaggcggatgtttttgaaagtaccatcatcgtcttcgtaataacctgctgtagaagctttctctgagctcaagctattgatgtcaataccaacatggttattatccatgtcatcaaattcttgattttgaaatgtatcaaactcaactgctacaatatgattagagggatctccattgtttgtcaaattaaagagccctagatattgtgaggatgaactatagggcaagcctttggtgggagagatgacaaatgcaagtccatggccatcaagtgcattaacattagagactatagcgaaaacaaaggtagtggagaaagacgaaacggtaccgtttggtgagttcttgaatctaactggagagttgtagaaaacgtgaccatatgagaattcagacgaatttgtgagcttcatcaagcctttggagttagtaattgcaattccagagttgtcgtacaagtaaccattaaaaccaaactctccttcttcactctgagaaagtgctttgttggagaagaattgcagcaccagaagaagcactagtacaaaaaatttcatcgttttgcaattcttttttcctctcatgaatgatcttaccataagtttttctttttttggtcaaaaccatatgattataatatgaaaaagatctaaataggctttatctgtatgacttggagggtcaaaaactaaagtcttttagactcttagtaataaaatgttgaataagtcttgttcgacgcctcttattgatttattaagaaattgaccagcatgaaaaggaggcattgctactatgtaatgtctgggggggagtttcacatcgatataggctattgatgggccttagtatgaagcccgtaagcccatattgaagctcgagtcttgatggcgcaggagagagagaaaaagacaatcacctgtagtaatctttgaagactcttatctcctctatccaccaagagagggaaaacgaaataaaaatagcacaggggagagacaaaatgagataaggatttgaagcctctcaccactctcctcgttttcgcttcgtgcttatttgtcaaacgcgaacatttcaccgaaacttagcgacttttctcgctttactctttctgggagcaatttctcagagcataggcgagcttaaaggtagctccttttcttagctttgctcaaatgggtttcttagttactcttcttatgtttccgtgataagatggttcgaaatttactagctttcttaatggaaatttttgagtttttctagttagactacaatgaaatttcaattcgaaattgagaaaaagagtggtccttttcttcatatgctttcagattagtctgtgttgttgtctgaggaaagcttgtaattttgacagtgtgtaatggttttctatgtgtaggtgacagttcttagctatggctacgattacaccttcttctattagcaatgcctggctcattcctggagcttcttttactgtaaagaagagtgattgttccatcaaatgtagcttttcgcgtaaagctgggaaacagattctatcatcaacgcagagacttgtgttacctttgtcgacttcacttagattgtttcctacacatggaaggcagtttgtgttgcatcctcatcgtagagctactgggactgatgttgtggcggctgtagaggaacaagattctactcctgttgttgcggaggataaagaaaccgtggctagtgagaagtcagatgctcctgctccaacatctcagtcaaggggaacagcaagacctggaaggaagagtgagatgcctgcggttaagaacgaggagctggttcctggagctactttcactgggaaagtacgagctattcagccttttggagcttttgttgattttggtgcttttactgatggattagtccatgtttctcaattgagtgacaactttgttaaggatgtttcgagtgttgtcactattggacaagaggtgaaggtaaggctagtggaagctgacattgagtcaaaacgtatttctttaactatgcgtgagaatgatgatcctcctaagcgtcagtctggtggtagtgataagccgagatcaggagggaaaagggatggttctaaaggaggaggacagaggaagggagaagggtttaactcaaagtttgccaaagggcagatgttggatggagtggtcaagaatttaacgaggtcaggagcgtttataactataggagaaggcgaagaagggtttttaccgacggctgaggaagcagatgatggtattggaagcatgatgatgggtggctcttcgttgcaagctggacaagaggtgaaggttcgtgtgttgaggatagcaaggggacgtgttactttaacaatgaaagaggaagatgatggtaagtttgatgaaacaaccactcagggagttgtgcatacagccacaaatccgtttatgcttgctttccgtaagaacgaagagattgctgcgtttcttgacaagagggaggaagaggcagagaagccacctgttgagacaccagtagagcctgaagctgaagcctctgtcacctcagctgaagtcgaggaatcggtatgtgtcccagctgaagtaacaagtgaagaggttccctcgtcagaaactcccaaggtagtagaagaagaagtgatagctaccaaagctgaagatgattcgccggaaaaagaagagcaaacggaaacacttgctgcagcagctgaagctgaagaggtggttcctccaattccagaaaccaaaagtaagttgactaaaaatcactagattgtaattttttttgtgtgctacttctcatattggtttattatgatcagtatcagtttatcagaatcatttaaaaagattatacaatgtttgtatcttagaactctatccaaggtaacatatacagctaaagcgttggggatactccaaattatagtagagaccttaaccacataaatagtcacatgaactacgtgttctaaaaaaatccagaataatcaaattcatgaagttttgtttgatggagcaaaaggtgataagaaacatataagaccacaaagataaagacattttagttcattgtgtaatgattactagcattgacccttttcttctaccggtgaccaggtgaagaggaaattgttgagaactctattcctccaaactcagccactgatgaagtttcatctccagaagctttagcaagtgaagaggttgagaaggagcaagtggttgccgaaacacctgttgatgaagtcaagactcctgcacctgtagtcacagaagcttcttctgaggaaagtggcaacaccgctactgctgaaagcatcaaaggtccttcttttgtccatcctttacctgttttacttcctgactcatgacctaatggtttatgtgagattccatctcctaacacaaaaatgtaacaggcatttcaccagctctagtgaagcagctgagagaagaaacaggggcaggaatgatggactgcaagaatgctctttcagagagtgagggcgatatggtcaaagctcaagagtacctccgcaagaagggactagcgagcgcagataagaaagcaagcagagccacatccgagggaagaattggtgcttatatccacgacagcagaatcggtgtcctcttggaggttaattgtgagactgattttgtctcacgtggcgacattttcaaggaacttgttgatgatctggcgatgcaggtaactccaagtttctagctgaaacattttcttcgttttgctataactgagaatataatttgacctgacatgtaggtggctgcgtgtcctcaagtagagtatcttgtaacagaagatgtttcagaagaaattgtgaagaaagaaaaagagatagagatgcaaaaggaagatcttttgtcgaaaccggaacaaataagggagaagatagtggacggtcggataaagaaaaggctagattcacttgcattgcttgagcaaccatacattaaagacgataaggtgatagttaaggatcttgtaaagcagaggattgcaaccattggagaaaacatcaaagtgaagagatttgtgaggtacactctcggagaaggccttgagaagaaaagccaggactttgctgctgaggttgctgcccaaactgcagctaaaccgaaagctaaagaagagccaaaagctgaagaggccaaggaagctgttgcaaggtgagaaattttttatagtctttgctcttcttgacatgaattcttataatgttggctatagaaagattcaaactttttgcaatacggcactgcagcccaccaactacagtggtttcagctgctcttgtaaagcaactgcgtgaagagacaggagctggaatgatggattgcaagaaggcattggcggcgacaggaggagatcttgagaaagcacaagaattcctcagaaagaagggtctctcatcagctgataaaaaatcaagccggcttgcatcagaagggagaatcggttcgtacatccacgattctcggattggagttctgatagaagtgaactgtgagactgactttgtcggaagaagcgaaaaattcaaggaattggttgatgatcttgcaatgcaagcagtggctaatccacaggtaagaaaatgtcctcagctgaaacaatggcataaattggttgttggtctctgacctgaaatgtctacgtgcaggtgcaatatgtttcaatagaggacattccagaggagataaagcagaaagaaaaagagattgagatgcaaagagaggatcttttgtcgaaaccagagaacataagggagaagattgtggaaggaagaatctcaaagaggcttggagaatgggcattgcttgagcagccttacatcaaagacgacagtgttctggtgaaggatctggtgaagcaaacagtggctactcttggggaaaacatcaaagtcagaaggtttgtgaagtttactcttggagaagataactgatgagacagacgaagtaaagttttcaaataagggagctctgttttgtgtcatggagtttaaagtaaaagtcttcctttttgttttgtagacaaaatcttcagtattcacattttgattagtttttaatcaaaacctgtaattttttgttcatgaaaatatgagatttgcattatataaatgtgcatttagtgacaatgtgacattatacactaaattcggagaaagattggttataatgaaattttaaaccttattttaaatagaagtttcaaatgaatttccctgaagaagtgaaactaaataaaataattttttgtttccttttggatattatatctaaatataaaaatcaaaccgaccgaattactacatacactacaataatgtttttttccttttataatttgtgggctaaaaaaggtcggtcggcccattttgagcccaataaaatttagggatagataaagacataaagtaacgaacgatattccgaggttgtcatttgctaaggaaaaaaaaaacgaaaacgtgtgtctgtctcttctcgtagcgtctctcaagctcaggttcgtgaacattccaatctctcaatgcaaaagctcattcgaattatccttctctgttattttcgagatccgatttactcttctttactagtcaattctagggttttgagtattgatctttcgcaatttcgaaattttcccaatttgaaaagataaaaatcttccctttttgtctggatcacacttgattgctgaagtcattgcatgcactgttttgttgtttacagatgaattttgggttgccaagtatatcttggtttggtagcatcagcacaaagaaagatgtagctatgattgattccgtgacaccaacaacaacttctctattggaacagccagagcaagagaaagcaacaacctttcttctcaaacagccagagaaagagaaaggcttatttgatataaagatatggacttggtcctccttcagttcagttcttccttggtctgcaaatgcctctgatggtaagcagaaacccactactatcaacagagggttaaaaaggcatgctctttctcggaggtcatcaagatcaaatggtgtgaatactgtttatcggtttagaccttatgtgtctaaggttccgtggcatacagggacgagggcgtttctgtcacagcttttcccgagatatggacattattgtggacctaactggtctagtgggaaagatggaggttcgatggtttgggatcagagacctattgattggttagatcattgctgttattgccatgatattggttatgatactcatgaccaggcagagttgcttaaagctgacatggcgtttcttgagtgtttggaatcaaacaagcgtgtagttactaggggagatgctcaagttgctcacttttacaaaacaatgtgcattacaggtaactacaatctccttatgcttttatatcaatgtgggattatttcataatttaccttattattcaggtagtaatatttgataatggccgtttccatttggtgatgtactgatgtatcttgaaaccatctatctcgaatgctttcaggtctcaagagcatactaataccctacagaagttaccttgtgaagatacaatacgggcaaaatctactcgactttggctggatagtgagcaacctcagcaagagaagctggagttttcagaaaaactgagacataaggaagtatatcggaggtactctgtcatcccggtaagcctttgtgggtgtcttcactttcgttttgtacatagaagtcataaagaaaggaatctgaggattaggttctttagtagtatagatatatatgtttagtatgaagatgtgaaaacgctagtaagtgttgtgcgtcttgtaaacccgttgtacatgtctagtaataaacccttgtttttgaagtcttttgtttgaatgatataagctctatcaaaggatcattataacttcatttcatggaaactcatgaactagaaaaactattttctatagtaaagtttgcatccaaaacatatataacaatgaaaaccacatccggtttacacactaccaaaacttttatacatatgaattatgaagtcttccttggcaaacacacatacacaaacccatatgtttcattagattgattagagaaagaagtaagaggaagaggccttattagagcttagtagaggctggtttaagaaagatcaaacatcactcctagcacacaaacacacaagaatacttcaaaacaaaatggctattcaatttcttaaaaacatattttttcaaatcatatattatcacataaaagggcttttcctagttcctgcttctgcacttctccatcacccttggagctgcaaaaaaagaaaaagcaagatttgtgtatgaatcattgtgtattcttcatttgtacagtagtgtgcagtaagttcctagtgtttaagaggcttggaaaggactaaattgcatcgttttagtttctccagtaatatatttctttagcttcagaatgtttatagaatccagcgagaagcttaagaaccatgaaagtattagaagggtgtcttagttcaaaatggaccacctttctaatacatcttaaaatcgagcacatgggtgtggaacattaaactagggtttagtaaagaaatactaacctaagccgatagcctcagagctcttcatgattctcagcttcttgcaggagcatataaacattctgcagaggaaaaaacagtaagagagcttcactgatctatattcttctgttaagctaaaactgtgctaagatcattagatatgatctaatacttgatgttaatttacattgttgagattgatcttttaaaaatcaaagacttactcccaagggacatctccgaccagcatccagtcactgtctttatcttcataggttacaacatactcagaaccacgcaagagatcagtcaagcgactctcgtttaacccatctctgccacaccctccatgagaaccaaactgacctgaaaaaaggaaccaaaagaaaacagttaactcaatcactggtattgatctcaaagaaggagagactagaaaacgttaccaatggtgaagcaactgaacatcttctcaagagcagaagagagctcaaggtagcttttgtaagtcttgagatcgattttcctcaagtaaggagcaccttccatactcactttgacatacaagcaaggttgttctggtccagacttagcttctgcttcttcagtctctgagttattaccaggtttctgagattgagaagaagccattgagttcttcctgaatgatcttattggtggccatcccaccacttgtgctctgctcaatcaaaaaaaaaaaacatcaagaatccctcttcacagaaatcataaaacagagcaaaaaagctgagaaaaatctaaaacagagcaaaaaaagcttactttgaagctggagctgtagcagagctcttcttctccttaaccggaacagccggtttagtgaaagttgtcgactttccatctttaacgacggaggtacggggaccagaacccgagccgacatcaccagtagcagtagtggatccaggagagaagacccatttgttagagtcgttaatagcgtcggagaacacccttttggcacctgacacgggacagctactcttgttgagagccaagaatcttgagtcgactcgctccggcgactcagaaccgggtaaaccgagtcttaactcggtagccttgaaattgagaccgttgttattgtctctggttttggttttgtcagacattgttgttgcttccatggttggaaactctgacaaacctatgtaatcatgctctgctgctacagatacagacatttttttcaaatataattgtggacaaacttttgaagcatttagtgattacaaaagaaaaaaagaacagaacactttctgagagaaatgggaaacaaaaaaatttaaagatgagatcaaattgtgagtgaaaatgagaaatgataaaaaggtgtgtgagagagctttatttttttttatttttttacctttaatcttcttttttcttggaatcgtattattttccaaaagtggacggaagtagtatacgtaattttatattcatataaaccgtaattagaagtaagtactttcctcttttggcgggtttaaacacaaaatgttgatttaagaaaatggtacacatgaatgtattgtatatacacgttacgttttgtgtagacatctactccccgacaggtcacagaaagcgtcctgaaacctttcctattatgcccttgtctcgactctcgtattccacgttttgttttactttttacttttgtatttgaaaaaaacaatttgctatctcatgaaggtgtgcatgttatgctatcatgcaaaacgatttagtatctaaaatacgcttttgtatgcaattcctttttgatatatgtatagagatgttgtaatgagtcactaattctgtttagtttggcttaacattatatgttttagattcactagacgatttgatataactcataagttagctcgtgaaaccaatctttactcatgaaattgagtgatgataatgataatctaataacggtgaaccatttaatcatgtgcatgatagcataacatattctataataaatcaaacgtattggagtttaaacttcacaaacttgtataaattcactagtagtttagctaacgaatggagattattagtaagtcgccaataattgcgatggaagatgatatttaggcttgggggtgagaacagagaagagaatctcgaaaaagttttgggcccataggctctcattttttgggtccaccagaagcatgaaaagaggaaagaaacagtaggggtagctctttgccacttagccgcagtagcaatattgagcagtgttcccaaaaagaattgtggtctccacactccacttttcatttttatcagacaatgttttcccaaaatcgagcatatatgctacagtacattacaatttgacctattagtaaaactttgatacttggatcatagtcttaaattaataaaagtttaaatgatcaaatcagatttaactttgatagtatttatgcccatctaatctatctccaagtatattttttaagtggatgactcaatctacatttaaacgtttcaactcatattttaacccatatttattaaaccaatatatctgatgctataacaatataacatgagaagaagtatatgaaatattgtcatttatattctaccagtgatttatatattgtttggctgtattgattaagtcattcatttgtaacaacgataagtatatacatagcaagaagacatacaaaaaagacctgtaagttgcagtattataaaatatcatatgcatagtaatttggttaaagcctgcctctaaggtggatccatctttggatcttatctaaagctttttagatttgtgttttagtgtaagttcgagtgtcttaatcataaggtgcctttctttaacttttcctttgtctctctctttttttgggcaaggtttttgtcgtttttgggacatctcaacttatattccaccttaactcaccatctaatcgtgccattagttacttacaaagctatctaaggatacgaatctttagtaaaaatgtgtctatcactatagaaatcatatgaaggctataaaatctaaagattagttggagttacccaaagtatttacttatctatatggatgttgcatcacatgtggcggttttaattattgttattattatatatggccacgttgggtttactgtattaacaagagacatcataagtaactctagggtttaattatactagcgagagacagcttaagtaacttaaaatgttggttttgaatgtttgtttatagacttgtgtgagcgacaaatacatactataattttatttatttttagtactgatgttatacttaatgttttttcatttttttctgcttttcatcaagcataataattatgactataattgaaaactatgtagttagttgaggatcgaatggaattacactaaacctaaaatgttaaatcagtggacgaccgtacttacagcgttagtgaaagatcggtttgtgtcgtaatcgaaaaaagaagaaaaaaaaagaacaaagagacagtgtgaatctttagacaaagaagccacttaccctccttgatttaacatccatacaagaacctcatgctccattataactcataacctaccatatcgaatcaatccgatggctataaatgattagatcgatataattttttaacctgtcatcaaattagatcgatataattttttaacctgtcatcaaattaaaccgcataatggtaactgccggttttgtttttcttatgcggttattaatttcggcgctgtctacatatagaacacacacacatatatataatattggatcgtttggtggctgagtataatctctacacacgccctcatatatatatactagataaggccgcctaaataggcggatgtatgatataaatttatttaaatatttatcaataatatttaaactttatatagtaaatagtaatctacacactttttctaatatttaatatagtaatttttatattacataaaattttaatcatacacattcaattttacttatattttaactatctatttcatcataataaactattttgttatttataacataaaaactacattcaaacactctgtggaaacgacatcccgtttatatcctctgacaatgtcggacttacaactgttggacaaacatcaaataaatataaaccgagcagtaattaaaacgcatagtttgctaatccattcactatgcgattagttttactatacacatgagtaactcggattatgcagtccctatacactccatcttattaatgatatttgaattttaaatagtaacgtaactctcatactttttcagtatgtaatttagtatttctttaaaccaaatttcaatcttacaaattcgattttgcaatacaatttaaatacctattttaccataataaaatatataatttaatgatatacactccatcttattgttagttttttatataatttaattatatacactccatcttcttgttagttttatattttagataagaaaattgtaagttaaatatttagatataaacatattaattagtatatataaatatctttgttttttagttttctattttcttttaggaaaaagtaaaaaaaaaaatcaaacacatgtcaaaatctaaaatcgttcaaataaccacgtgtcatgatctcgtgagttagtaactttcaaaattgtactttatataataagattaactttttttcttaaggtatttcaaagattgtaatcatgggattcatttgattttctttaagatacatatggtatgggctacattatagaaagtgcttgatattgggagattgactttgtccatcagagtcgacgtttctaagtcatactcaatgatatgggtttacgtatgtgcttaatatatatgcatattgcgctccactatcaagatttatgaagaaaaagaatgctcaatttccacatgatgaatattcacattgttctatttaacgacttcatatactaatttcttctttatatacacacaattttgagtcgaaaaatctattaatcttaaatgtataatgatcttgatatatactgaaaaaacgttgaaccgatcgatggataaatttgttggaaaattagtgaaaagtttgtaattaatgtaactagataaagaaaaaggcagaaactacagtgctatttcggcctcaattctcaaatgatctctagattcctattattgaaaaatgcaatgaagaatggtgtgtacataaaaacgcagcatgatgcatctcttgtaatccatcttttaaactcaatcggctaatagtgaaattttcaatttctttgagtttttactcaatactgatctgatatctagtgaaacaatttctattagtggcctagtggggtttaatatacggattgagatggatccgtcgacagaattttactatgtttttggtgctccttataatgtcaaaacctaacattacactttgctcgaggcccatgcactattcttgtatttatatatgttaacaaaaatgcccaataagatatgagctcattggcccagtaaatgatatcattcgaaattaatcatattctaaaaccttaggggtgatattcaataagtacgtataaaaataacggaagaaaattgtcgtctctaactctctgataattttgagaatatgatcaaatctaccagtgatatcttttaatgttcttatcgaaagaagcaaagacgtacaagtttcctgtattttcgtccatacatacactgagtcactgacttctgcggaagaaaaaaatcatattctgtaacaacaaaaagaattgtcaactacagcaaatagtacagtcaattcacaaatctatcttaacaagtacttaataactaagagataaacacaaatgttactttccgcaatcacaatattaataaataaaataaaatcgtcttactgagtattaatcaagatggtgacaaattgacaaaaaaaaacaatcattcagacaactaaatttctattggtataattcttttccatatatttttaattaatatgagaaatagttactctcttttaagaaaaatgtggacactcgttttttccctgacggcaacactggttaagggtccttgatgtgtaatcgtgtcattaaaaactaataaatgagttaatcaagtcaacagttattattattattattatttattaatacaagttggcattgctcctctcaatgatttaactcctttatgcagggcctataatttaactttcatatgcaatcatactgactttattcctctatatgtaaatattttgttaatgtgtcggtagattttctaatataaattgactaaaacatagagacattggcgtttgtgtaaggctatcgacaaaaggtaagataaatcagccaatcaggcaaaggaagaaaattcaaacaatagatacgagagatatagtgatgcaaaaacatgttaatcttattgtagagttggtttgaatatgggaaaggtcttcaaagaaagctgaagcattcgaagaattttatttagggccagagtccagagataaaaatgaaagaataagattttcatataaatttgattatactttgaactattgtaatattccttgagtgattattatggttgacataagaggccttaactatatatgggtcctatataagacaatttttcataaacaccaagacggaataggtcaaccgcatgtcttctccattgttataatttcttaatacacaaaattacgttaggtgaagaaaatcaagaattattcttgttttacaaattacaatatttaacttatctattttctcaaagaccttattattattttcaaattatcatggtgaaactacatttatatttctagtaataatgcaaaataataataaaaaacaagacgacacactaaatgactatattggtcatttatttgtacaatcgactaatgttacatcgtaaatactaaatatgtgggttcgatacaaattaaaattggataagaaaggataaacaatggttgacttcgtttgaccctcagtaattacgatagagtgacgtcataccattttcacaaaattgctggccatttaaatcagacagatcaaaacgaccctaaacaagaaactgcattgtccttcatttttgtttttggtaaatataaatgcaatgttttaaaaaatcgcctcttaactttgttgctatccataaaaaaaaaaatccaaaaggggaaatttttaatataggaattttttaaactattgaaatttctgtaatgtaaaggttgaaattttaaacatcaattatgttgaatgagaaagaaaaataaaattaagcattgttgtctaatctatatgaagctgaaagaggtagtaatcagatgtgggcgcgagcacgtaacatgtggcccaacatgtgggcccaacggtgtctctgaaaacatgatacggtcactttcacgtgcaaaaagcccaacgtgtgaatacagtttttgttttaagcccatttatcattggccccacacaccggcctctccaaatattattcaccaatttagaaacgcagtataattattatattttgaacccaaaaataaataaattgaaaaggctttataattatttaaatgaaaatattatgtataagctattcgaaaaacaacgaacacgactcggtaagttttaaaacctctaaaatttgcttttgacataaagataaaatgaatcatttcttaagacgtaatgataaaattatatataatatagcaaagactaataatgtgaagttgaagcttatacgttacaccaacttgaaattaaagctaaattatgaagtctttatttcataatcctaaagcagattgcatttgaaagcaatacaaatcaaacttttagtcagctccaccaaaagttggtcgcatttaaatccaagagtaattaggctcttaatagaagtttaatttgacttagttttctcatgatgatgactccttgcatctttatccaaattgcaacaactaatgtttagttgaataagtaatccaaccttttttttatttggatgatagatatacgtatcaattacagaattatacgtaagtattatcatttcttttcgtatccagcctcagtctatttccgtctatataattatcactaaaacaattttcttaaacatgtctattactaaaataaataaagctcaacttctcaaaattgatattccttaattatataaacacaagatatctcaccaaattacctccatccataaacatataccactggattgatcttcgtttgtcagtgatgtagatgcataatatgaaaccttgaaacctttaacattgtattaagaactcttcgtatagcacatctcgactatgtaatttatcttgtgtaccttagcatccatttgccttcctttatgtgatcaagtgaaggacaactcataatcatccttgtaactccaagaaaatgagctaagtcagaaaacataaaaatagtaaataaacaatttaattttctgtgtttgatttgtgtatacaaacacaaatccatagataaaacatagatccattttataaagtcaatctagaataacttgatcggacttaatccatcatcgtatagcgataagtcatggcaactaaaagtcacaacacaaggcatattttattttcaataatcaaatgtaagtggaaatattactctttttaatttatgaaatagaaaacggaagaaaatttcaatgtataaatcaagtatgtttgccctttctttctttcttacaatcaagttgaatttgtttagtgaaagtagggaacgctagtggacaagttgattcgatgaagaagagcattttattttctaagaatcggttatgacgtacatgaattttaaggttgactctgactccctttgtcttgtcccttttatagtttctcatcaaattcattcccacttgtggtgaccccgtcagtgacatgtgcgaatcttaatcctttctcgattttaaaatccagacatttttatgtatagtaaaatggtcctttaatgatatcaaaatgaactgtgcctagtaaaaaaaaaacatttttattcgtcaaaaacgtggtttattagctttctctgttccactacagtttctatttttacagtttttactgtttgctgagagacagagagagaaaataggcctttgcacgtgcaggccatgtgggccaccgacccaaatcagaatttcatacagttttgtcttgtagtaaaaagcaattgggcctttaaacatggcctgttccaaaaccattgcgatccacgggttttccagtcacatgtttcatcacgtgaccaaaaatttgttaaacttatattttgcatttaaagtataaaaaagcgatctctaaaacgaattttcttgttggcaaaccaatttcctataccctggagggaaagaagtactcttaaaagcggtggcaatggctctaccaacttatacaatggcatgcttccttctgcccaaaacagtatgtaagcaaataatctctgttctagctgatttctggtggagaaataaacaagaggcgaaaggtatgcattggaaagcgtgggatcatttgagttgttataaagcggaaggaggcattggatttaaagatatagaggcttttaatttagccttgcttggaaagcaaatgtggcggatgctttctcgaccagaatcgttaatggcaaaggtattcaagagtaggtactttcataaatctgaccctttgaatgcaccattaggatcaaggccatcttttgtttggaaaagcattcatgcatctcaagaaattctaaggcagggtgccagagctgttgtcgggaatggagaggatattatcatttggaggcataaatggctagattccaaaccagcaagtgcagccttacgaatgcagagagttccccctcaagaatatgcttcggtatcctctatcttaaaggtgtcagatttaatagatgagagtggtagagagtggaggaaagacgtgattgagatgttattcccggaggtggaacgcaaattaataggggaacttcggccagggggaagaagaattttggatagttacacttgggactacacaagctctggagactacacggtgaaatctggatattgggtgttaactcaaatcatcaataagaggagtagtccacaagaagtatctgaaccgagtctaaaccccatttaccaaaaaatttggaagagccaaacaagcccgaagatacaacactttctgtggaaatgcttaagtaattccctccctgtggctggtgccttagcgtatcgacatctatctaaggagtcagcctgcataagatgtccatcatgtaaagaaacggtgaatcacttgttatttaagtgtacttttgctagattaacgtgggctatctcttctataccaattccactgggaggggaatgggctgattccatttatgtcaatctgtattgggtttttaatctgggaaatggaaatcctcaatgggagaaggcttctcaacttgtaccttggttactgtggcgcctgtggaagaacagaaatgaactagtctttagaggaagagagtttaatgctcaagaggtattgagaagagcagaagacgaccttgaggaatggagaattagaacagaggctgaaagctgtggcacaaagcctcaagtgaacagaagttcttgtggaagatggaggccaccgccacatcaatgggttaaatgcaacacggatgcgacttggaatcgggataatgagaggtgtggtataggatgggtcctccggaatgagaagggagaagtgaaatggatgggagctagagctttaccgaaactgaaatctgtattggaagcggaactagaagcgatgcgatgggcagtcctttctttaagtcggtttcaatacaattatgtcatctttgaatcagactcacaggttttgatagagatcttgaacaatgacgaaatttggccaagccttaagccaacaatacaagatctgcagaggttgctctcccagtttacagaggtcaagtttgtgttcataccaagagagggaaacacattggcagaaagagtagcaagggaatctctttcttttttgaattatgatcctaagctttattctattgtgcctagttgggctagaagtagtatggattgatatctctttgtaagaacgttggataattattagttgttgttgagccaaaaaaaaaaaaaaaaaaaacgaattttctttagaagaaataccaatgattaagatatctatcatatgcgaagctctaacatagaaatcagctcaaatcaagaagtcacatttgtatcatcacaaatccacaacatagaaatcagttctatcatggaaataatgaatgtacaaagaaaattttctccactacactcataagtagaaaccgttatatgagttatagtatgcatagtcaaaaactagcatgcaacagtgatctttaaaacagactgttgaaaaatggtaaaaattaacatgaatattaacagattggtatgtttttcaatgtatttggatgtgtttgttcttttttctcatttttacatttaatgcaagttaaattatatatatatatatatatatatatatatatatatatatatatatatatcgaattaaaagatgtctaaccgattatttgtttagccgtgttaccatccacaaaagtagttgtctacctttgtaggcgaggaaagtaattagagttcaatgagtggagaaaaaactgcaaaagaaaacatttaataataattagtaccaatctgttgatattcatgttaatttaaaacatttatatatatgaagacaaaacaacaaataaaaaaacacaaaaggcatgattttaggggttttgggatctgtagcttaatcacacttattctttaatttatatgttaattattgagagtgattgaattatattttttaataatctatggccactgagatgtggtctaccaataaattctttgtcaattatatatacagataaatcatatatgaaaaaaacaattatagataaatcatacatatacttaattcaaacatagatgctaattataactgaaagagtttacccatggttctacaacaaaacatataattgctttacaaacacatttgatattaaattgttttagttctattaacatcacttcaattttcacctcaggtaaaacgcttttttgttttgactaatttgggggggggggggggggggggggacttgtactaaaatttaacaatgtgtgggatacataatagtaaacgttatgcgcagaagaatccaattgatcgaacagcatttgatggggcaataaacgaagtgtgttatagatttgagaatggagtaagaagttgcatttgcaagtttaaaaacggcctattttcgtcatatatttacttcaagtagaaattcacatatccgtaaacaaattcacaaacgatgacggcaacttatattttaatgtagataattaatttcacaagtcgtgccaatacgacaattgtgtcggcttccttccctttaaaaatgtttatcttttcctttttaaattattgtttctgcttagaaaagtatccttttcacagttaaagacttaaagccgatacatattattgaaataaaatagacacaaagttaagtagatgtattattatgtatacatgttatcgggatataaaaaatatgatggagcgtaggataaatgtatttaaaatcttattttatcatctatgtcattaagatgcatttaatttttctctgaaatgtgagtgattagaacaatttaaacatatggatataactttcatgaatgtgataccgaagacaaacacgaaaatgtatactatttgatgatatgcagattcagttgacaactctttaaagtttcttaacataacaaagtgagcgtagaatgaaagcgaattcaatgactgagattatttaagcgtgtagatccatagaaagaggtggtcgatacgtaacaaactaacaatacacacacacacatatatatatatatatataatatgtattattaaataaaatcttacaaatgatataattcatttagagttatattatctatttacgtatattttgcaatatctctagatttaatcttctactccaaaagtatagtacatgcttactttacaaaagaaaagggagctaatttttgaaaattcttgtggattgtgattgttcaattatatacataactacaaagacatacgggcatatatcccacaaaacgtctcaaaattctcttacgtaaataaattaatttacaaatatatatatatatatatagttttgtttatagttttgtacgtttcgtatatttactactatagttatatactttactatagacttaattaatagcatatattgaaagctttatacaaccaagaattatactcacaacaaatttggttagtccatgttataatcaaatttaaacgaattagattctgttatctacctccaattttagtcttcttaaatgcatgactagaagtaaacaaataatctgagtttttttaattaacaatatgtcatatgtggatttaataatacgttgtattacaatgacagtacgtattaactcaaattactatgttagctcttggttaataaagaatttgagttcatataaagaaaaagtatataagtaattttgaaaataaaataaaataggggtgatggaggaagacaagaaagaggaatttggtgcttggtgtttgtttgtaagcattaaataataaaaggagaagaactaagaaacattaaataaggaagagaataaatatgggaagaaacgacacttcctctccgacaaagattttggaagcgtgttagaaagaaaactcaaccctatttgaatcggaaggaccaatttgactgtggaccaaattgttagcattagatttgatcccacagtttaagacttccaattactataatttagtcggtaaattttgtagactattttttttgaaaaaatattgttctaagacatgcgagtattctgttaatataattattactttttatataatagagaactccaattgttgaaacagattaaaacaaagatttggtgtagaagatgatcaaatattacatgaaagaaaattctgtagttcattcttgtatatttttataagatatttagttatattatttatttgaatgaagaaagaaacaaacaaaaatgtaatattttgagatgtctaaggagtattaagatgtccagactaactttaaatttttctccgaagatttattttgagattttttttcgttttaatatttttgatcagtttatgacgataataaaaataaacgaaacttttcttaaatctatagttgggaaagtgattgattttcgtaaaaaccattttccaactaatataacatatgataggaaagtagtcagaaaaatcttacaaaaatgtgcatggaaatggtggaatttacaggtagcattacacataatcatttcatcattaaatgctaagtttatccaccatattggcttggttacagagtctaaatagaaattgcaagagttacatcctagttttgtcaaactttggactacactattacagtttcgcctcttgtaaagaaaaatcgttgaagagaatttcgatgaccagttgtgaatgtcctggactaagttaaagatctcacttctagttgtagtcccggtaataaatacgaaatataggattgtattgtattgtatgttttctgactcgtatattacaagtatatgtaaggatttcttggaaattgaaatcactgggaaacagaatattagggatctccaaaccctaggacattgattccttcgagattactggtcttcttcgttgtaggcaaaaaaaaatggtatttattgttaatttgtatttttctgatcatgcttggacaaaaaaaatgactcgttcaggttagaatttaaaattaagtgtatgcgtcatatgacacaatgctctcgtcatcttgtgtctaacagagtgaaataaagaacgaacaattgtttgtatacacacaaatacaatcgcacctacatgtgcacatattttattacgcttatctatagaaaactgtttgatacattttttcattctaaagtaaatacacaatccaaaaaatactatgtcatgttaagaatgtttagtatatctatttattttaggacaaggaacatttaacatatagtaaacagttttaacaaaatttctctgatttgaaatatattttttatattatcagtaaaaagaaaactgtaaaggtaattatagtcgttgattaagattatacttagttttttaaaataacatgttttaaaaattttgcaaaataagtttttttttttacatgtctcataatttttgtcctcagtttatgttaaaaatattttgttattttgatactaacatcttccatacgctgaaaacatctttgagaatatttttcaaaacacaatatacaaaaatccacagtgactttattccacgatgaaatgatatcaagacatatatgttcttacctttacctttcaacgaaaatgagagaaaaaatatatatatatagtatcacttttagaaaatgtttttttttgctaattaattattatataaaaatgttgagagcaacttgatcatatatgtaataaagtcgcagtgaaaaaaaaaatgtaataaagtcgcataccgacgttgtgactcgtttttatgtaattgattagttaagtacagagttcgttagatgtatttgcattgttacaattacagaaaaccctacgcaacacaattcagtactttttacgtcagcaaaaatagaatctttcgttgaaaataataccagaatcgttcttgtctttaattttcttacctttttgtaattggatatgatttttgactatggaattattattattttattctataaaattatagtttttattattggaatcatttataaatgctattactcagtgttctttaaagtccatactaacgaattcaagtacttatttaacaaaacaaaacaaacaaatactaataaactaaaagtacaaacattactatgttattaaaaaaagcatatagctgcgtgattttaaaggtatatgtgacatataatacaacgacgccgtcgtattttattgaatttttttgtcacttttaattagtatacagtgaggaaataagcaaaaagaaagaaaaaaatattgttggctcggctagtacctataaataaaaacactagtatttggcccaggatataatcattgcaagtttagaactagttagctaatctaaaccgttagatcaaagaagcaatcttactaatcagaaaaacaaaattcaacaagttacaagaatgaaaaaaatagggataaaaaaaaggataattcatttacattcgatcaaaaggcgaatgcatagatcatagatgcaagacacttgtgagttgtgatataaccaaaaatttatttaattatatgtaatatatattcgaaaaatttatacaccgtatataaaatattcgaataatccttttctttgatttaaaaatattttctgcttgttttctcaactcatgtattaatttaaataataaaagtagctaccacctttctctgccccactttaagataaagctaaagcatggaaaaaagcatgggaaaaaagtaaatatatgatatacaatcaaataaatctaaaaaaatagaaaagaaaaattaaaggaacgaaaaaaagagggaggaaaaagacaaaattaaaaaacaaaaataaaaattccaaaaaaattaacatcacatgttatcaaatgagatcaaaatttaagttagttttgagttttctctctctttctcttctctaaaactacttaagctaaagaatcaaacacttctcaacgtttctccaaagcctctgattagtaaacacataaagagatctatagagagagagagagtagagataaaaggtgatgaatagaggtgtgttggagagttcgccggttcagcagctgatggcagccggaaaccctaattggtggaacgtaagcggcggcatgaggccaccaccaccgttgatgggtcatcagcaggcgccgttgccaccacatatgactcctaataacaattatctccgaccacggatgatgcccactcccttcccgcacttcttgccatctccggcgacttcttcttcttcctcttcttcttcaccgtctttgcctaataaccctaatctctcttcttggcttgaaagcaatgatctccctcctgagtcttggagccttagccaacttcttttgtaactatccctctatctctctccctctataaatattccaaaatgaaatattctctatacgcacatgacatgatcttgtgtttacttactagttcactctttgttttctcgtgtgttgctacttagtcctaattacctttttgttatacgtatatacgtatatacatgtatgtgtttgtattttaagtatcaaacaaacaatctaatattttggatattttctttgtgaacttaggggtggattgatgatgggagaggaagagagattggagatgatgaaccatcataatcatcatgatgaacaacaacaccatggttttcaagggaagataagattggagaattgggaagaacaagtgttaagccaccaacaagcttccatggtggctgttgacatcaaacaagagggtaacattaacaacaacaatggctatgtcatatcttccccgaactcacctcctaacaaatcttgtgttacaacaactaccacaacaagcctcaatagtaacgacgataacatcaacaacaataataatatgttggatttctctagcaatcacaatggtcttcacttgtcagaagggagacacactcctccggatcgatcctctgaggtaacactttttccacatctcagagattttgataatatacggaaaaagctcggaaataatatctagttttacacataaattagtaaacacatcaactactatgaaaaagtgaaatctaaaacgtcatttaaaaagatcaggacaacatattttattttaaggtttggatctaaattcaacacgcaaccaggatgagttttgctctgaattttttttgattaaatgactaattgatctttgttttgtttgttatctatatatgtgatgcagtgtaacagcttagagattggtgggtctactaataagaagccaaggctccaaccttctccttcgtcacaatcaaccctcaaggtaactaattgattatatcaacgaaactttggataacttatataacgttttctgtatataaattccctccctgacatcatactaacaaaacaaaaacacaaacacaaaggagaacagaagaagcaaacaaaacagaatgggcacagaataagctgtgtggttttgtgttttgtaactcttttgttctctcctgttttgtcttcttcttcattcttcaatattcctttcctctctttatttcataaaaatcaaacttaaattaataaatttcaacattctccttagaattagacgacactatatgtaataaattttattttatagaatatggacattttgagagatttcaaagttctgtcaaaaaaaaaaagagatttaaaagttttgtttttttctgtaacttgttttgaaacgtagaaatggaagagtcgcattagacattggattcaataatatcatgataattatatatactagtgaaagtaaaataattgtttatcacttgtacatgctaagtaagcacgttttctctatgcatggtaattagtaaaaataatatgaccacacatgcacatatatatagaaagctttttaattgatgctattaattaatctatggtggtaattaaaggtgagaaaggagaaactaggaggccgaatcgcagcgcttcatcagctagtatctccatttggaaaggtaaagatcgattccattaacaaatcaaatttattaatgtcgtctaatattcctctatcaaatcaacttttaacattaattgtggagatttttttagtttcattcttgttaatctaaaatctaaatcattcttcatccctttttacccatcttttgcagactgacacagcctctgtcctgtcggaagctattggatacattagattccttcagagtcaaattgaggtgtgactcgtcttttccaaactccaaatattctcattcagtaaaataaaaataatgcttatgattactccgtttaccaaaaaaaaaaagaagaaaaaaaggttgtgattactgagaaataaattacagaataaagcataatgatattatataagaaagaataaagatagtagtataaagttttgttctctccatgttaagtaatatttgattgatgtgattatatataaagtatttatgactttttgcaactgttgcactgttgcaggctctgagtcatccatactttggtacgactgcctcggggaatatgaggcaccaacaacatgtaagtagcaaattttcgtatatatactgatatacacaaacaaatcatcatgctatcgttttatacccttaacttcttctttttcgataacctacacgaaactttttatacttatatattatctcttaagtcttaactatggtttatatgaatagttgcaaggagataggagttgcatatttcctgaggaccctggtcaggtacgtccattttttcttggtcactatacttttaatatataattagagtcactatactttttattggatcaattgaatccaaatctaaaaaatgtggacagctttagtttccaaaatttatccttttttttcttttgttttttttcttttctactgttttctttaaagtaaagttggattaatattaaaagatgcagcggccagcttttttttcaccctcccttacattattataaaccaaaaaagttcgttaaaaccaacaaagccactaaatttatttaaatatcaactttttctccttacttgttttcttcatctaagtgaaattcaaattcctttggcggggttttatatatgcttttcactaggggaaattcaatgattttttttcttatcacctctttatataggtgttagagaacatgtgtttactttttttgttaatcaatgctatatatcatgattgtttttttttttttttgatatggttttagctcgtgaacgatcagtgcatgaagagaagaggagcttcgtcgtcatctacggacaatcaaaatgcaagtgaagagcctaagaaagatctgagaagtcgaggtttatgtcttgtcccaatctcatgcacactccaagtaggcagcgacaacggcgcggactattgggctccagcacttggctccgccggtttccattgagccaatgaaattacgccacgtggaattc

SEQ ID NO: 643 - DNA, 101679 bp, Arabidopsis thaliana
gaattcgttagcgtttatgtgaataatcatccatcatcaggaaagatccgaagaaaagcgacgccgttttaaaggagatggataaacaaccggcgaccagttggagtatccatacccggccggagataatcgccaagtacgagatcttcgagcgagtcggatccggagcttacgccgacgtttacagagctcgccgtctctccgacggtctaatcgtcgcgctcaaggagattttcgattaccaatctgcgttccgggagattgacgcgctcaccatcctcaatggatctcctaatgtagttgttatgcacgaatacttctggcgtgaggaagagaacgctgtgcttgtgcttgagtttcttaggtcggatctcgctgcggtgatccgagatggtaagaggaagaagaaggtagaaggaggggatggattctcggttggggagattaagagatggatgattcagattttaaccggtgttgatgcttgtcatcggaatttgattgtacatagagatttgaagcctgggaatatgttgatttctgatgatggagttcttaagcttgctgattttggtcaggtgagattatgattgttactgattgtgttagttatttcattgtttgatgcacaaatatgagaaacctctgaatgaaaaatgcttggtttgcttgaaatttggaagagttagtgtaatcaagtggctagaccttatcatttagtgtaatctatgagtttctaaatgtgtgttggcttcttggttcatatacaggctaggatactcatggagcatgatattgtagcttcagatgaaaaccaacaagcttacaaactggaagacaaagatggagaaaccagcgaaccaccagaagttattcctgattatgagaactcacctaggcaagggtctgatggtcaggaacgggaagcgatgagtaaagacgagtacttccgacaggtggaagagctcaaggctaaacaggttgttagagatgatactgataaggactcgaatgtgcatgatggagacatatcttgccttgcaacgtgcactgttagtgaaatggatgatgatctcggtaggaactcgttttcttacgatgctgacgaagcagtggatgatacacagggtttgatgacatcttgtgtgggaacccgatggtttaggccaccagaactgctctatggatctacgatgtatgggttagaggtcgatctatggtcgcttggttgtgtgtttgcagaactcttgtctcttgagcctttgttcccaggaatttcagatattgatcagatcagcagagtgaccaatgtgctgggaaatttaaatgaagaggtctggcctggttgtgttgatcttccagactacaagtcaatctcatttgctaaagtagaatctcctcttggtattgaaggatgccttcccaaccattcaggggatgtgatatcgctgctcaagaagcttatctgttatgatccagctagtagagctactactatggagatgctgaatgacaaatatttaagtgaagagcctcttccagttccagtttcagagctctatgtgcctccgacaatgagtggaccagatgaggattctccgagaaagtggaatgattacagagaaatggattcagattcagattttgatggctttggacccatgaatgtaaagcctaccagtagtggatttacaatagaattcccctgaccttggcatttaaggtacgcagtcaaaagctctggctcgcttaaacacataaatcagtctcttctctctctctctttcttcttcaaagagaatgggtatataccaaaacctgacatgtgtttctttaggtcttgattgatgcaacactctttgttgtttgaagatcttgttacagaataccgcttagaaaattgttaacttttcgttaggacattgtttaggtatcaatggcggcaaaaacttttgaaattcgtttgctcattgatctcacaacttttttttgcgctttgtttctctcatcgatctcagttttatgtgtttatctctccttggcagagtccatggttgagcatcttgatcatcccgacttcccctgaattcgcctactttgtcaaaaatgtgttgtgtgtgtgtgtgtgttgttcctctctctctgcctccctcgtatgaaaatggtaacatttacaattggaaagtcggtgttagcctttagctattagctgaagagctagttttcttgttgcccaggccattctttaccctatttttcatctgaagtaacaatgaaacaaaatctatatatactcgagttttgctttctaggatctgtatttcttaattgtttctatattttgatcaattttgaacttttcatatcaagttatcaacatgtgtagtagcaacccttcaataatgagaccatggaataaaagcctatcctatatgtcatccagtttttgctaagataaattattttcagttacccaaattacataatcaaaactgatatcataaacaacaaaaatagcacacacaaaaatcataactgaatctgattcttccagaaatgtgaactgttgtttactataaaaagaagaaaaccagaaccacaatacatttgactccatgaatcagtcatactagtccaacatactaaatataaaacttaaggggcaatattgaaaattagacaaaagttgatagaccaaaagataaattaataacagttaccagtatctatcgccaagtctcccctagggttttttttctctgaaacggacatcgagaaattccaggagtgagttttgacaatcggagagaaatggggtcgacagaaaaagagcagacgacgcaacatcacccgcctcacatcagcagtctcgtcgtacgtccctccggaagcaacgacagagaagacggccgcaacgccgccggagactatgagcccggagaagtctctcgtgaccggccttcgtttaatcgctcggatcggtataagggtgacaatggtggttcgtatctcttctaaacattccagtcctcttttctcctgagtttctcttctcgttattggtttcgatttctgaaattgggggaatgaagaacagaactaagtaggcatcacttgtttctttcactacaaatgcttgtgattgtctacgtcttagtcaatgttttatctcctttgacttgtgattccgatgaggggaattgtgtgtagttatctcgtgagcatttggtgctatcttaaaggtttttgataatgctctcataactataacaatgctgtgtaaattgcaaatgagcattgttcttgccttgaagtacttaggtcttgatgtttacataatgcattgttttcgtaaaagatgcattatgtaatgtatctaaagagtatagtgactcttagtgcgattatacattgctacagatgcatatcaacattccctgttcagttcttagtgaattgtttggtatatgctctgagaatgctgacaccaacggacttgtaatttcacagtgtcagtgctccattttattggtctgcaaagaaaatgattttttgaactttgctgtctgctgatgtatatttgtattatactgtagttgacttagtcttgttctactggctactttttgtgtgtgtgttaggacatagaactcgggcaagttctagctcaccaggccgtcgtggatatgaagatcacaagcatggctctgatcttaatcattcaggcgttccacctcgtggccgtgagttaagcagcagaagggaagcacctgggagacacagagactattccccacccttagctagaggtggagctggtgctcgtccttatcgaagaggtttagatgggcctgaacctccacatggaagggatggcatgagcagaaataatatatcaaaggtgcaaccaagagaaggagattggtactgtcttgatccattgtaagtatccctgctattctaaatttctacaatctcaggttattctatatgaactctatagaatattggtatctcagaacctagagaagtttctaaatcccatattatgtttgttttgtcatgaatacagatgcagaaacttgaactttgcgagacgcgagtcctgctacaaatgcaagaggcatcgttatgcaccggctaatagtcctccactgcctcgccttcttcctcctcccatgaatcattccccaagaagagactttaatggctacagatctcctccgcgtggctggcccagagactacccgccgccaaggcatgaccatcccacatggagagacagagaacgagaccgtccgcattactcagaccatgagtaccctcctagcagaaggatagcatctgactgggcccatacagagccgctcccaaaacctcattatgacagacgaccacctctcagtccacctcgtggtggcagatggggacgagttttgagagagaggagcagatccccgccattgagagatgttccaccaccgccattgagagatggtccaccaccgtcattgagaggaggcggtccaccgctgcacagagattaccgccgtgacagtcactttgacagagaaagacgagacgatgggcgtggcggcagaggcagaatgggaaactcttactgatgcaaaaactgtgtatgtcttgggattttggtttagacagttcaaattttcgcggaatgtgaccttgtattacaccttagattctttgttcttgttagcaaaactcttgtgccattagtgcaaaaaccaaacaaatgagaagcaattttggtgctctttcgtaattaaagaaacatttagggccgaaacaaaaaatatacttcttcttaatattccccttccgtttcggcttccgcttgagaaggtgcgtactatgagttcacgagtggtctatctacgtgtcagttttttattgggtgatagctaaatacacgcatattaaaagggctttttggatatttgcttcaccgtagatcggacggtggaaagagacaaaacctaaagcatttatgaattgacatcgttggatcatcgtatttaacaagaaccgtacgatgagattgccacgcaaatctaaccgtcgaatataatccagaaaattgaaatttcaaaacatgttagagagagggaggaggagagatggtgtgagagaagaagaagaacaaaaccgaaagtatttttttgtgcttttaatttttgtttttaattttaccaaattcctctgagggcttcttcttcttcttctccgtcttcttcttcttcttcttcttcgtttagagctaaaacccaatagaaccctaattctcatctcccttaaagcttatcccttttctctctctatatatatacgcggatcaaattcaaagtctcagtttttgagctttcttaacagccgccgaatcgatttgtgattttcccgctccggagagattcggatctggatttttcgagctgatttgtaggaatttctcgttttctcgcggtgaattatatcaactgtggaaaaaaggaaaatttctgggtttttttggttttggagattggaaaatctttgagagatgggtgaagacggcggaggaggcgaattcccgccaaaaaaggacggtgttgaagagggttttccgacgaagaagccagcaaggcagctcgacttcactggtggctccgatgaacattcactgtctaaaccagcggctcctaccgtcgtagctacgtcggtgaaacccatcattagtagctctgtcccttcgacgatacggccgggtatgaccatagcaatcggtcaggttactcaggtacgaccgacgttaccaatggcgacgacgatgtcaaatccgccgtcacagtcacaaatcgttaacgcgccaattaggcatccgtaagtttttatctatcgattgaaaaattcaaactttttgtgttatcttaactcaattgagtttgtacaaatttgattggggatgatgaaattggtttaaagtttaatccttttagactaattggtgaaactaatttaaaatggatgatgaaaatttcaaaattttcttctctctttttatacaggataccggaatctccaaaagctagaggtccaaggcctaatgtggaaggtagagatggaacccctcaaaagaagaagcagtgtaactgtaaacactcacgctgcttgaaattgtaagtcttcccattcttgtgttagaaattgacactcatcaaattttgttatgttgtagtttatttagtttcctggtgacttgtttgtatgattgcatgttcatatcttttccttttcttctgctgcatgtctaagaaactcaaaagtctgattttttaagtttaccaatttttgttgttaattgtggatttctgcactatcttgtcaggtactgtgaatgctttgcatccggaacatattgtgacggttgtaactgtgtaaattgtttcaacaatgttgataatgaacctgctagacgagaagctgtggaagcaactctggagcggaatccatttgcgttcaggcctaaaattgctagcagtccacatggtgggcgggataaaagggtacgtggtcctgaggaacttgttctagatcgtgggagagttctttaagcttctaagttattgttgatttgcctttgtaggaggatatcggtgaagttgtgttgttagggaaacataacaaaggatgccactgcaaaaaatcaggatgccttaagaagtattgcgagtgctttcaagcaaatattctttgttccgagaactgcaaatgcttggattgcaagaactttgaaggaagtgaagagagacaagctttgtttcacggtgaacattccaaccacatggcttatcttcaacaagcagcaaatgcagccattactggagctgttggttcctccggctttgctccttctccagcacctaagagaaggaaaggtcaagagattttgttcaaccaagcaattaaagattcatctaggcttagccactttccacaggttccaatttaccattttagcatatatatgctttttggtaaccatttatagaactgaaaaatatatttttctcttgctgttggcttagtgaagtgaaatcttattatttgtatttaggtaaataatggaagaactggtggaccaacctcaggcacatctccatcacctgtttctcgtgctggtggcaatgcatcgtcagttccatcaaagtttgtatacaggtgaaatttctggtgttcacaagttatttagtttgatccaagagctgtctaaaactgacttgtacgttgtaattttttgaaggtcccttttagcagatataatccaaccacatgatgtgagagcactttgctctgttttagtcactgtagccggagaagcagcaaagacatcaacaggtgagactttggttaaaactctgtattgatgaggttttagctctatatgtacaattcactgatcttcctttaaaatcttctcagataaaagaaatgaaatagaaaatcgggtggacgatcaaacagaaacttctttagcttcttctgcacaagatcagcctcaaggcaataacaatgcagctgatgtggagatggttgcaactgatcataatcaagctgataagtctggaccagaggaatccaattcagatggtgttgatgcctctaaagtgaccccgctatctccagcaactttggctttgatgtgcgatgaacaagacactatcttcatggtggctgcaccttcacctaatggctcagtcgatcccaatggctgcagaccaaactcacagggccagtcagaaatttacgcagagcaggagagactggtgttaaccaaattcagagactgccttaatcgacttatctcttacgcagaaataaaaggtaaaaattccgtgtttcacacacatttcatcaaaagtctttcgtctctaaagttagttaagttcgttggattgcagaatcaaagtgtttatctttagcaagaatgcacatacagccacctgcaatcgcgactgtaaaaaccgagaatgggattcaacagcaagtaccaattgtgaatggagcttcgcgaaccaattgtcaacctacactcaacaaaccgcagcctatgcagctgatgaacacaacatcagcagcaccagcaacagcaacaaacactcaacatcttcaaaaacctccagctttatcagagaagaaagacccctgaatcagatagattattatactctacttaggacagaaaataacttaccagagagagcacgctgaaatctgcctcaccaccgccctatattatcaggtaatcccaccgtaatttttctttctcagtggcggttgttgcggcttcaacgcattggcaggtgattagagagagtaatagacacaagcttttattgtgtcgttaagctttcttctcacttttctctttcttttcttataaagtctcctctttaaagccccttgtggctggtgtagattttggtgagctttgtttctttactacacgaattttttgttagttttttttttgtgttcagtatcactttttatgttgatggtttagctgtggaacacccttgtttactgtgtcggattatgatctgagatgtttctcaatcagcttctgtaggatttgaaagtaatatataataaatccttaatttgattataaaaaaaaagatgtaaatttcttcatatttttctctctggctagaacaaatcataactttatgaaactgacgtcactacaaacatttattaagagcagaaaattgtttattttaagagtgttaacaacaaccacaccttaatagcattttaactttgaactttgaaacaacaagagagactgatttattttcatttagtgactaacaccttcagcctctccttctgcatatacttaattaaacgcttcacaatttggacctcgacgatttcgattcactctgcagccaaaaccagaattttcatcatgaataaatcgactatacactgactagtactgcattcatacgcttggaaacatttccatcatagagatctagttattatcataaattgtttactcaaaacttcatttttactagccaaactacaaaacaattctacatagttcatgccatacttgaacccaaaatctaatgttagcaggtcccttgcagcagatgaatcaacctaaattctattctcatatcgtttatcgatttgttaataagagaacttggttggtactgtgttttcttgccacatcataaaatgtaaaagaaagttgagaaactttaccaaaagcattccattcattgctctttcctccagatacctcgatggtttgaaaaagctgccataagtctccgacaatttcttgagcctctcatatatgtactttggtccaacagtgtctgcccagaaaacaattcctcccctgcaacaggtaaaaaaaattgcttaacataagaaatgatcatacaccaaaaatcttagtgactaacaaaagaaaggaaaaagttttgaggatattgtgaacgtttgtaaatgaccagaagaaactcaaagatgtgaaaaaatcatatgcataagatttgagcagaggtaatgcatttccagaatttcacaaaatgctcccttttgctttatggggattatgacttagaatcctcaccggtaagaaggaaaactcattccaaggacagacgcaatgtccaagtctgaggctcggatcacaactccttcatctaggacgcggcatgcctcgttgacaacagggaataagatcatctctacaatttctttatcagttactgatataggctgcaaaagaagaacagacaatagtgcatttcatttttttaaataccaatagtagtactgatatatttcataagacctcctctttttttaccttcccaccaggcatgatattggtcagtttccttgatttctcaacaattgaaagcactgatggatcaggttttggtttgcttcccttttcgtatatatagtatcctcttccgttgatttttcctgaagccagaaatgttaaaagtggacacattaggaatttcaaaaggtaagagcaatgacataccatttcgcccgctcttaagaagaagctctgtcattggagatctgaacatgcggtcaccatagaccttggcatatatcggcccaactgctaatccaatcccgtgtccagccaaatcaccaagcctgagaagtgagtcatcgaaaaaaaaaaaattcttcagttgctgagatagccatagagcaacactgagagtaacacatacacatacggacacacatacactgtaggtaacaaaatatagagggagagacttactggaaagggcccaatggcaagccgaaagaggtaataacgctgtcaattctgaacaagtcaacacctagattggccaacatatgtgcagcttgtgaataaggaaagaatgtcctattcactgcaaagcctatgcagtttccaaccaccacgggaactttctttatggcctttccaaccgccatgagatccagaatcacctgagcagaagtattctttgaacgaacaatctcgagaaggggcatcagatgggccggactataaaaagacaaaccatttgtatattacactaaaaatacgaaaaaagcataaaaattttgaggcattggaaacgcagaatgacctgaagaaatgtgcgccaacaatgcgatcttttgagttagtcttttcaccaattacatcgaggtcgatagtagatgtattactcgccaaaatgcagtggggtgaacaaaccttttcgatttctttgaatatgttttgtttcaattgaatgttttcaatcactgcctgcaaaatgataccaggagcaaggccttacagtaagaagacataaatacgagttgtccctctcttcgaattatctagatttgtatatacttgaaagttgaaacaaaaaagaacgacatataacaccaaagtagataactaaaattgaaggcagacctctatgaccatgtccacatcattgaattctgtgtaatcaagtactcccttgaacaaagagagggcctttcctgctttatcttgtgtcagtttccccctagataccaagcttttcatatttgctgtcacaagaaaaaaaacgaactttattgcatctactcactgtaacaggaatagtaataatcatatattttattattccatcatattcaatggatacttcgtttggcttcaaacaactcactgaagtgtttgtacacttttctaatttcttagggctgcaaactactatataacacttcatctaagagaacctttttattatgcaaccaatttttatgaagaacgattttgggctgacaacgtagataacagttcaaatttttggtatttgaccaagatagatacttctataaaatagcaactggatatgttatggataagataataaccttcaactgattttattcccttcataaggaattctgagtttatttctttgagcacaactcttatattgcttagaagtagagccgtagcgatgcctgaacccatcagaccgccaccaataactgcaactttttttatcggccttggtttcaatccaacgtcagttacattaggcacctgaaaagtgttttaagagatgctcaggatgaacactgaaagtgaaaactagaagtgctagaagaaacaaacacaacatatgccaatctcacttttgatgttgcacgttgtgcaaagaaaacatgaacaagaccctttgcagtgtctgacagtactagttgcttgaaaacttctgcttcctgcgaatcaaagagtttaggtacatagccaactagacaattaccgcaagtaatcaatgcaaggaatggacagattttgtgaaatgaagcactcatgattccctaatttaaaaagtcgaatgagcaccaacgagcagtaaatgatctatgtcaaagctattgaagaaatacggtaaacgtcgaaatcctaaagataccttgagaaccccactgtatcctccatggatgattccttcttcaatcacctcaatgcaagcatggtgctgaggcatatttggggcaatcttcttggctagctgtcttgaattcttcaatatagcacgagcttcagataaagaaccaattttgtcggttctgtgcagtgactgcagaaagggtttacgtccctctgcaatgtctagagcccactttctggatgtgctcaacacatctccaggtggcaccaaggcatcaatgagacccagtttgtgcccctcttctgaggatattgacttagaaagctaccgaaataccagcatatagtttaatacaattttcagcgaagcaaatcatattgacgcaaacttggtaataaaactgttggtaactgcagaaaatgtcatccttaccagtatcatatccgttgcttttgcaaggcctactaaccttggaagacgttgggttccttcatagacacaattagctcaattatatacatatctattaataaagaaaacctagccaaaaaaagtatcgccttcatttaaaagaagacgtagctgaaaaaacaaacccatacctccaaaaccaggaatcactccaagagtcagttctggtaagcctaattgagctttcggagcagcaactctggcatgacacgcctaaagaatttcgagttacagaaaaatcaacacaaaaagttaagaatatcaaaacacactttaaaacgcacaaaagggaaagaaactcaaaactcccaccattgcaagttccaaaccaccaccaagagctaatccttcaactgcagcaacaaccggcttcctggagtctgtgataaccgaataacaacaccaacatcagcatcacatcatttgatagttgcagtgcaacttacatgtgatagttgcagtccaacttattgagaaatacatcaaccctgaaagaacaaaaaatctgaaactaaaaagaagctaaataccttccatcaggttacacacaagctcaacagatacttcaggcataagcgataaatcccctgccaagaaacaagagtctcaaaacccataacaccaatttgattcactatataaataagtactaacaacagaagaaactttaccagtcttatgaacttgctgaaagacattgatatcaaaaccacccgaaaatcttccattgttccctgaagtgataaacaaattcaagctccttaagcaacaacaacgataagaaaaaggattaaactttcaaaccccttcaatacattaatttacaatttcacaatcgctagctacaagatcgaatacaatccttcaaaacaaaagtttaccgatcaacacgatggccttaacatcattcctttgattggcgtcacgaaacttctccttcaacccagaaataactgagaattcacacaaccaaacaagatcaaatcagcttaaaccaaaccaattccagataaaaaaatcgtgcatgatctaatcaatcacagagaaacatttaagcttttttaatacttggactggctaaagagttaacaggagggttagaaatggtgatgacagcaacaccatcgttcccaacttccatcgttactccaatcttcttcgccatagcttaatttctctctgatgagattgaaaaatgaaagctttattattcggtgagtgacaaaattggataaagatctggttttgtgataaaaatggggcctttgataaatcaggagtttacatttgtaacgtgatcgatatttctttcctaacttgttgtttcgtcattttcgtcataagcaaccaaatcttctggtcaacaaggccgcattcatatttgtttggggcctgtccagctagttaatattcaactatatgaatcccgattgataaacatagagcggtaacaaaataatttagaagataacatcacaagttgagagttcctttttagatattggtttagtagttaccaaattcaaaatcgttaactctcaacttataccggttcagtttaaacttcgaacccacaaatattgggcttcttaatacatttttgtgatttgcaggccaatagtggactacaacgacaagtatattgagccatgtacgggcccatcttcttaattcaattattacaacaacaacaaaaaataaataaaaaaactcactttattaaagtaaaagataaatcacaaaatacgacaaaaaaaataaaaaaaaaatcacaaaatattataatgatttataatttttctttaaaaaaataagtttgtgctataaaataataattaaacattatattgacaagtaagtgttaagaaaaaaaaaacattatattgacaagtaattaaaataaaatattcgcagccaataagaaccaaacctaacattatagttaatggagtaatttttattcagacgattaagatcgtatacaatagttaatgtacccttactttcagcaaatctaagcccgaacaaaaccaaggatgtgaacaaatatatctataagcgtttgtggttttctccgaataatgctatataatgtaccatgacaaatataattatatgaaaatgtccactaacatttgttggtttgaaaatttatagttttgtatattcagtacttagtatatataagatccacaatcttttgttttctgttaaacgatttcagcctaatgatttgacaaatgactaaaatagtttcaaataatttgaatcgatagcaaattattgtagattaaattcggttttagtccgataccatttgctgccaacacatcaaagactaaactatcaagatcaaatgatcaaccattaagtatgctattctcttagctgtaccacagtagaaatgtaaagtcattttaaattgaagcttcatacttataacttacgagtattaatcacaagagaagagagagagactatatagtctatagtatatgatttttttttttacacagtctatagtatattaatatgttttgatatgaagacaaaacagcattgaagaggtgaaataactgaactacaagaaaggcccaacgaacaacttattttcactggcttcagctgtcattcttaatatctcagagagatacataatgccttggatagaataatattgcttctgttcgaaatctcgtgatcatttaattttcagtgacaatttattttccaggttttagggtgtttatagttcagtatcgtcaataaatgactaaaaactctaatctttgaactagctagtaccatttaaagttgcaatgtttaatatgaattcgcgatttgtaaaaattatatgggtcttagttgtttcttattttgcttagaagttaaaactgtgtatttcaaaaccgacactatatataaactctaaacaagattgtaattgtttgatctcttatgtatcaaagaacaaatttgacatagatcaatttttacttaatacatctactcgactattgtataactcaaataaaaatatcattactcttgcctcctacccaaaacacatctgatttgtcatcctcaccttcttcctgagtaaacaatttccttaagaaacgcaactaatcaccaattaacttacgagcttcgagttttgtattaatattacttattacatcatcatttctcgagaaatactgtttactttatggatttgaaagatttttttaatcttccatattaatctttttgtctcccaacctgtcaatttaatgcatttacatgttctactaactttggcctttgggcgcagccacatgctctgcatgctctcatttattgcacttgtagtgtatacatatatgtacattaataaggtgctatttatacttaacattttcggtttatttctttactttttgtcaaaaagtttatagagttttggattatgagaactgattttaagcattttaatttgaggtatactctgcgtacgtaaactgacggaaaatacgtttgtatatcaatatggagaaacaaaatgtgagtcgagtcttttggtgtgtaaattcccatgagcgccatttttttacttcaccaaaaatagtgaggcaagaaaatgaactttacacttgaactttacatctcttaactctaatttttttatttgacaagaaaaaacatacgatcaaaattgcatggaaaaacgttaattaatctcattataatctccagtccattttataaccctcctacctaccacaaagaatccatcgacgaaatagagtatccgatgaattaatccatatctatgccaggaaattaccgaaacaattatagacatatagaagaagatagaacattacaacatgcatatatcatgtcaaaagtaacttctaactaatatcagtgatttacaagagaacaaaatggatttttttttatgtatacataagagaagtaaattgtaactcttgacgtggagggatctgcatcgaacatataggtgatgagatggtccaacattcatttataacttatccatctgtcactctataaccctaattttaacccttcactcttctatataaatctcccccaagtacttaacactcttcactactctctccactaaacaaaaacactagagttaagttacatatagagtaaggaagagatggcagttaggtgtttagccgtgttcctcgttgctctcatggtgtctcaagcagtcaccgcaacaagaccggctccaaccaagaatgtcggagctggtcttgacgaccaaaagaactttgtagcgttcgctggtgtcggtggagctgctggaattggtggagccggtggtgttggagctggtcttggtggtgtcgccggtggagttggtggtgttgccggagttttgcctgttggcggtgtaggcggcggaattggtggtctaggcggtggtgtaggtggtcttggcggtctaggtggtctaggtggtggttcaggtcttggtcatggagtaggtggaattggtggtgaccctggtattggtagtggtatcggtggactcggcggtgcaggtggtctaggcggtataggcggtgttggtggtttgggtggaattggcggtggaagcgattgcggtggcgtaattcctcaccattgatgttaaacgtttttttttttgtttttttgctctctataaaccaaagatcggtcgaaaggttcataattattatgttttaagttcttttatcgatgtttatgttttaagtcgtttgttttctatatatgtttcttgttttgtttgttatgctgtttgttattaattacttgtgagaaacttgtgttatcaataaatagtgtttttttttgtttcatgttacttgcttgtgttccaagatattcaattagttgaaatttgcatgcagcaatgtatacgtcaaacttaatcccatttgtaaaagttgtcagaaaaacaaaatcttctttcgtcgtgattgttataatgtagagaaaaacagaaatattagctttgtagattaaccaagcaccattatgaacgattttcttttgccgaccattataaacgaaattaggttaacaaaactaatcctatacgtcaaagtgttatatttaagcagtttaatacatgttgacagtgcaccacaaatattgttaaagtttcgactttcaatactgaattttatttaaacagtttcaaagaaagataaaataaaaactgcaatactgtttcagtatcacattctcgaaaatcgtcggtgtagtattctataatgtattgtttatgagtttatctgttttgtaaaagggtctatacggtggaagttcaaactatacatgcatggcccatgaaacatggattacaattattacatgaatgcagtataaatatattactatattcgtataatcgtatcggtgtatattgatatattgtatatttttatttagtcgacatgttgacaaagaaaactttattgacatatatataatgtaagaaatactggtctagtactgtctgtttttgaaaaaacaaataagggcctagctatcttaaattgtaaatttgccactttcacgttgggaaaccatttccaatattgtaaaagcttataattaatgttttctttttagttctaacaaaagtctccaaggttttcttcaaaggtataaattaataaaagtaaaatgaaatattaaaacaaaattaagataaaataatatttccgctgaacattgtttgtaactgaatttatctttttcgggatttattaaaaatcacctaaagactatcttaaagtagtaggcacggttctgtatgtaaccattggattttatttccatgactgatagaaatttagttacaactaccaacagtaatagccaataggtaaatgtgtagttccaaaagagaagcctctttggaagcttaatttagatctcaacgaacgaattacacttactaacatcataatggaagtgtcacagtatttagaaagttcaacaatttctttgtaagaaaggatttttgtttttaattattataaacaacaaaaagcctgtgaaatttttgtgaatcatcaaactctattatgcaccaacaaaattagaactattaccattctaatatatcgtttaacgttttaacaacataaattgttttgtttgaccagctcaacaacttgttatactccagcaggagcggaacgttagttaccgtgtcacaaccatttatttttctgaaagtaaatagaaacttaaagttgatatcagagcgtttggttatagcatttacaattggcattaactatctacaccggtcgattttattgtatgtggcctttcttggcctttaaaaggacccaacatatctcccagattttgggcaaggcaacaaacataatcaacttaaatcttatctactttctatttctttttaatcaaaattaccgttcttaactatggcgaagtggtttttcactatcttcttggtttttgccctagcctcagctttagcttgtggcgcaagaaacgtcccagtaggcctctctgaccaaaagaactacctcggatatggtggcggatattccggcgttggagacaatggtttaccctttggtggcgtcggtggaggtgtgtctggtcccggaggtaatcttggttatgggggatttggtggtgctggtggcggcttaggcggtggtttgggcggtggagcaggcagtggattaggcggtggcttaggtggtggaagtggaattggtgccggaaccagtggaggaagtaccggaggagttcatttcccttgagttgttactttggtttttaaggcgtcatacggtccttattaagctaggtctagcttaagatgatgtcataataataatttatcatatctctttagggttttaaactttggtattatgaattatcattagctgtttaacgtgcgtcttaagttactattttaacgtatgtttgaatcagtctagtggcttgtcgtgtcatggcttggtccattttcaaattctactttgaccttttcgagtgtttcactaaatgagttaatgcaacatctatgaacttttcaatattattataagctctatttatagactttatagtatatataagctctctacataaatgtgtttcgaacctacctcgaagcttgagttaattaaaagttcgactaaaatacaaaggaaataagtttaagaaacaaatgattgacgggaaaaataaaaaagaagcaaatgactaaactaattaaaaacaaattaattaaactgtttcaacccattaagaaattgaggtttgtcgtaatacatatgacatttgatagatgtaagtaagaagtaataaaattaacaagaaatgaaactaataagaaacaaaacaaacaaaaacaatatagtatactatttatcagactgttaacttacttacatagcattttttacttgaaaattttacgattgtgtaattataataaaattttcgagaaaattaatccaaaggtgttgagggtggttaggtgaaaatagtaaagtcgaaataagtgagttccaatttaaaaggaaacaaacagtcaaactttatatttattgcagaacatagcaattcaaaatactgttcgtgaggtaggttttgtgcatttacttctctcttgaatacaaatgtgtggtctgggagtacataacaaaccctgggtcaggtgaaaactattcctgcgatatataaattcgactaatcaatttcatagagaattacgattttatatggtttcacatagatttaacaaaaatatttatcagaaaacattttaaagtgtacgattatatccatatacattcaaacattttaaagtttgtgattatatatacaaacatgatttcatcaattccatttgttaatatgttcttataatggtctacattgcgtttaaactatatatcaaaatgcatttgctatcggatcaagttttttgtttttgttttgcattcataaagttctcataatttactaatatattatagaaaaacatatttgctacattttaatttgttgaatatagtctaacacccataaatttatatcttaaacatgtgttatagaaggttttaccaaacaagcacatgtttcttttatggagtctggataccatttgatgcatttcccccctagaaattgtgattcaatgcatgtttggttgcagttcgcaatcttcgaacaaggacctatcggaattagtttactcctatcttcagcttccgcaagatctgtgtttatattttggaaaacaaattagtatatgatataaaaacatacattaaaacataagtctcttttggtttgtaaaaatacaatattccaatgtcttgtaacaaaaatccgtatatcacatgttcaactatatcaatggagaatttatttaatatttgcatacatggagtcaagagagcagccaaacacaagaacacaaagaaaagacatttgcttgatgaagtcattttgatttattttttttttttttttttttttttttgtgtgtgtgttttcctgcttatgaaatagaatagttcaaaaccttgcactatataaatatagagtagtttactatatatcgtttctcagaaattcagaatatatggattaatgtttatttatatgctatatatgataggatatgttattgactgagagtcattatattctataactttgattatttgttatggttatttttttcctggtcaacttctcttttgttttaaaatttaatttaattgataattttgtttaggtaagtagtttatgaagagacaaactgaatacaatatattttggaaaaaaatactgcaaataaagagcattaatttcgttacagtttgttactattgcatttcaacgaatccaatatattgttattaatttcaataacgtaacgtaaaactctgaatactttaccagctacttttatatagttaacaaaaaagtatgccaatactgtatatataactttagtttaagtaaaactaggttaatgaaagaaacagttactttaacatatttattactttatacattaaatttattcgattatagatttcaaattatagtactgttcataatcacaatctaaaccacaatattaaaaaaaaaaaaaatcacataataaactcaaaactaatactagcttacaccacagtataaattagaatttttttatttttaatatattatcacacaaccatctagtttcatcatttaatgtgaccaacctttcagcttcaattctaattaacctatgatcacgtaaatgatttgcagcatgactcttcattaatgcgatgtaataatatcaaaattaccgtttcactttcccactataaaaagaagtaacaataaaaattcttcctaaagtttttgcttgcccggaaaaaaaatgaattacatcaaacaatttatcttggcaatttgcttttatctagtcttaacatgtcaagatcatgttttagcccgcgacaccaccacgagagacatcgtagtcccgaagatttccgagtggcaagttacggttgctaacggtttgaccactggtgaaactcttttcatccattgtaagtctaaggaaaacgatctaggtgatattaacctgaagttcttagatagattttcttggaattttggagaaaatatgcttcactcaactttgttttggtgctatatgagcaaagatgatggtcatatgaatgtaaaagtgttttgggatgatgttattctatttcatagatgtgattggaagaattgtgtttggaccgcaaagaatgatggcctttatctttggaattctgcaatcggtgaagatgtactgtcggagaaatggaaatctggatggtgaaaacatatttttgatttgttggtaattttttaactattatatgtatctgttaattttggcaggcaaaaaaaactgaagtaatactttacttttgtcataaattctctcttatttttttgtatttttcatcgaagatttttgttttcttcgatcgtgtcttggattcaattgtttttggactgttcaagacaatggtttgctgctttataatccacctcatcatagaggttttagattgatatataaaggggattcaccatgattcaattcattgttgaagtcgagagatctttgaaagtttattcgagtataatccatattaaagaaaattcaaccatgtattttgatcacgatatactaataattaattatcagtatgagattttatgtatttgttatttatgggggactcatgggtcaatcatttctaagaaagtatggatcatggattcgttttcgttcaacttatttatgaccatatatacaagtactaatggtgacactagaatacattgtatgacaatagtctcttgaaaacaaagtcaaagcattaaatatagagatcggagtcaacaatttagagtttatagaattaaaaggaaaggaggataagaagaagaagaagaagaaaaacttagcaaatatatgaacaaatatataaagacattgtaacacatttacctctgacataagtttttttacatttgacaagaaagattttagaaaaatgggaaaatctttgctaagtttatttgttatcctcctttcgtttgattctataaactcttatttgatgcctcctctcttcagaaaattcaatgtccaaatagtaaatcaacttgagtttcacaagatactgaaagttcattgcaagagcaaatctcacaatttcccaatcacatatcttaaaattggtgaaagttttcagtttaaatttaaaatttatccaaaaactcagtattggtgtaatttatggcaggtgagaaaacacatttttaacttttttatacatttctttacatattgtcatgtataaaaattaagatgagtatcagtgattgtactataaatttttgaccaactttttatttcatctttgtttgttatagggaccaaattacaaacaccatgtggtttttgatgcgtttcgtccagacaaagattttatagatggtacatgtactggtatgcatcctaatgtatgtagatggactgcaaaagaagaaggagtctatgtccgcaacaaaaagttcgaaggagaatatttcatgtatacatgggatggtccatcaaaacttggaaacatctctccagtgtctgcacctacaagtgaatcagaattggactcatcagtctaaccccacatagatctaaaaaaaattatatcatgatgtataatctttggtatcaataattgtatgttggtttcaattacaagcccaactattgtttgggcctaatatttatatatgggccttagtcaaagattaaaaaaaaaacatttcttcttcccaaagccagaaaatatcagtacaagagtacaagagagaaagaaaggaacctcgaactcagagaaattgagagaagagagaagaatcatgggacaaggaccatcgggaggattgaatcggcaaggagatcggaaacctgatggtggagataagaaagagaagaagtttgagccggcggcaccaccggctcgtgtagggaggaagcaaaggaagcagaaagggccagaggcggcggcgagacttccgacggtgactccgtctactaagtgtaagctccggttactgaaattggaacggatcaaggattatttgttgatggaggaagagtttgtggcgaatcaagagaggttgaaacctcaggaagagaaagctgaggaagatagatctaaggttgatgatcttcgtggtacacctatgagtgttgggaatttggaagagttgattgatgagaatcacgctattgtttcttcttctgttggacctgagtactacgttgggattttgtccttcgttgataaagatcagcttgaacctggatgttcgattttgatgcataataaggtatgtgaaattagggtttaagaatcttgtttttgttgtgattacgattgtgtgttgttgtggatttagggttgctgatttgttttatgttaggttctctctgttgttgggattctacaagatgaagtggatccaatggtgtctgtgatgaaagttgagaaagctcctttggagtcatatgctgatattggaggtttagaagctcagattcaggagattaaggaagctgttgagcttcctttgactcatcctgagttgtatgaagatattggtattaaaccaccaaagggtgtaattttgtatggtgagcctggaactgggaagacattgcttgctaaggtttgtctttgtacctagaatctaatgagtattagtgtttgtttgcagtatagcttagtttactacttaacttgtcaattacattcagttaatcgtttgttcggtcaaaggccagacctttgttgtgctgctggtcacctagatttcatacgtttgaacatagcgagaaatttgttctcatggataagaatcttttgagtcacttgtttctattaatgtcttcctttctcgtttctctctgtcacaagcatgagatagttgcaatttggtggtgttatctaatgggaataagctctctaacttgatcttattttaggcggttgcgaattcaacatcagctactttcttgagagttgttggtagtgagctgattcagaagtatttgggagatggtcctaagcttgtgagagaacttttcagagttgctgatgacctttcaccatcaatcgtcttcatagatgagattgatgctgttggtaccaagcggtaagttaaactattttcataaacctgatctataacccattgataatggttatctgattacttgttgtttgaaagaacaggtatgacgctcactcaggaggtgaacgtgagatccaaagaactatgttggaacttctgaaccagcttgatggatttgattcaagaggagatgttaaggtcatccttgcaacaaacagaatcgagagtcttgacccagcactgcttcgacctggacggattgataggaaaatcgagttccctctcccagatatcaaaacaagaagacgtatcttccaggtaatatataattctactgagatggcaaatcaatgacttgttcgaaactttcttgttcattgaggttgtgggttctgtttataaaatagatacacacatcgaagatgactctctcggaagatgtaaacctcgaagagtttgtgatgacgaaagacgagttctcaggagctgatataaaggctatatgcactgaggctggtctactagctctcagggagcgtcgtatgaaggtagagactcttaaccatttagttcaagcacatacaaacacacacacacacaccacttgggcaattactagccactgacgctaatgtgtttaaattggatttgttcaggtgacacatcctgatttcaagaaagcaaaggagaaggttatgttcaagaagaaagaaggcgtccctgaaggcctctacatgtaaaattataatcatatcgtcatcatcggctttcctcctccacactttgttataatacttttgcttctgcttaggatctttctggtcatataaattgatcatgttttctgatctcctccggtaaaacaattcctcatttccatttaggatgtctatttcgcattaaacttaaccaactgaaaccaagcccaaataaaaaaactgatcttgtcacagaatgtgaggacaaaaaaaaaacaaaaaaaaattctctcttccttggcataaccaactcttcaaactctctctatcctggatgcttcacacaaatttgtggagcgcttgaaaaattgtttcataaaaatagttgtctatatttaatttcggtaatctattgtgcaaacatcggctaaatagtaattacacaggttcttttaagttttaacaaatcgaaacttacttcataatgtgaagagaggagataattcaaaagttactaagtgtcgcttagcgcccatgcgagacaaatggttctgtaaacgtcaatgtagccaccgaacagggctctgcaagggactcagctgcttcaccgaagccttcaatggctccaacgttctccctagctttcacaatgtcaaacaagttgtttggtagctgagccacaccgtccaagaactggatgacgctcgacatgcttggtctgacggctgcaaccggatgcgaacagaacaagccgagcttcagaaccagtgctacttgctcctcaaggtacttatcatcctgctttaccctctcatcaaccacttgcaatatgtcatcttcccaacaatctagcacccaatccgtaagaaccatctcgctcggcgaagatgctcgtggcaagacgggtcttcgcccgcaagtaatctctaacattagtattccaaacgcgaatacatcagaacttgtgcttgccttccctgttcttgaaagctctggtgagatgtatccaaacgtaccagccacgttagaggtttgaggatcaaacccgtgttcacagagctttgcgagaccaaaatcaccgagctttccgttcatagaatcatcaagaagaacgtttgctggcttaatgtctctgtgaataatgacttgaacccactggtggtgtaaatagcagagaccagaagcaacatctttgatgatcttgaatctttgtgaccaatcaagactctgttctggttggtggtagagaaacttatcaagactgccttttggcatacagtcgtaaaccaaatagagttctcctttgcgcctacagtagccaagaagccgaactagattaggatgtctgagacgcccaatggtcgcgatctctgccacaaactctctcattccttgtcttgaatcatgagaaactttcttcaccgcgatgtccatgttagacgtcgataatgtacctttatatacttttccaaaccctcctttaccaagaagctcgctgttcctgaaaccctttgtggcaatgtaaagatccttgtaagcaaacctatgtggaccaaactgaacctcccagtcttcaagaacttccattaacttcttccttttcaagaaaagcatatagcttatggtcaagaagacgaggatggcgaggctggttaaactcaaactaatagccaagatctttttcacacttgtactccgagagtctctaggaagttttggaagacgagaaatatctatatttgaagctgtcccattgagcttgaaggtccaaccaagaatatagtgagatgaacgaagacggcctgtggctgaagtgaagccaacatacatagagtcgaaaagatatggagataaatctttggttagagaaagcaatggaatctttggcttagggagatgaataggatggattgtgacgttaagttgtctccttgaggaatcatattcaatccaggcttgtataggtttttgatttatgaggcggatgtttttgaaagtaccatcatcgtcttcgtaataacctgctgtagaagctttctctgagctcaagctattgatgtcaataccaacatggttattatccatgtcatcaaattcttgattttgaaatgtatcaaactcaactgctacaatatgattagagggatctccattgtttgtcaaattaaagagccctagatattgtgaggatgaactatagggcaagcctttggtgggagagatgacaaatgcaagtccatggccatcaagtgcattaacattagagactatagcgaaaacaaaggtagtggagaaagacgaaacggtaccgtttggtgagttcttgaatctaactggagagttgtagaaaacgtgaccatatgagaattcagacgaatttgtgagcttcatcaagcctttggagttagtaattgcaattccagagttgtcgtacaagtaaccattaaaaccaaactctccttcttcactctgagaaagtgctttgttggagaagaattgcagcaccagaagaagcactagtacaaaaaatttcatcgttttgcaattcttttttcctctcatgaatgatcttaccataagtttttctttttttggtcaaaaccatatgattataatatgaaaaagatctaaataggctttatctgtatgacttggagggtcaaaaactaaagtcttttagactcttagtaataaaatgttgaataagtcttgttcgacgcctcttattgatttattaagaaattgaccagcatgaaaaggaggcattgctactatgtaatgtctgggggggagtttcacatcgatataggctattgatgggccttagtatgaagcccgtaagcccatattgaagctcgagtcttgatggcgcaggagagagagaaaaagacaatcacctgtagtaatctttgaagactcttatctcctctatccaccaagagagggaaaacgaaataaaaatagcacaggggagagacaaaatgagataaggatttgaagcctctcaccactctcctcgttttcgcttcgtgcttatttgtcaaacgcgaacatttcaccgaaacttagcgacttttctcgctttactctttctgggagcaatttctcagagcataggcgagcttaaaggtagctccttttcttagctttgctcaaatgggtttcttagttactcttcttatgtttccgtgataagatggttcgaaatttactagctttcttaatggaaatttttgagtttttctagttagactacaatgaaatttcaattcgaaattgagaaaaagagtggtccttttcttcatatgctttcagattagtctgtgttgttgtctgaggaaagcttgtaattttgacagtgtgtaatggttttctatgtgtaggtgacagttcttagctatggctacgattacaccttcttctattagcaatgcctggctcattcctggagcttcttttactgtaaagaagagtgattgttccatcaaatgtagcttttcgcgtaaagctgggaaacagattctatcatcaacgcagagacttgtgttacctttgtcgacttcacttagattgtttcctacacatggaaggcagtttgtgttgcatcctcatcgtagagctactgggactgatgttgtggcggctgtagaggaacaagattctactcctgttgttgcggaggataaagaaaccgtggctagtgagaagtcagatgctcctgctccaacatctcagtcaaggggaacagcaagacctggaaggaagagtgagatgcctgcggttaagaacgaggagctggttcctggagctactttcactgggaaagtacgagctattcagccttttggagcttttgttgattttggtgcttttactgatggattagtccatgtttctcaattgagtgacaactttgttaaggatgtttcgagtgttgtcactattggacaagaggtgaaggtaaggctagtggaagctgacattgagtcaaaacgtatttctttaactatgcgtgagaatgatgatcctcctaagcgtcagtctggtggtagtgataagccgagatcaggagggaaaagggatggttctaaaggaggaggacagaggaagggagaagggtttaactcaaagtttgccaaagggcagatgttggatggagtggtcaagaatttaacgaggtcaggagcgtttataactataggagaaggcgaagaagggtttttaccgacggctgaggaagcagatgatggtattggaagcatgatgatgggtggctcttcgttgcaagctggacaagaggtgaaggttcgtgtgttgaggatagcaaggggacgtgttactttaacaatgaaagaggaagatgatggtaagtttgatgaaacaaccactcagggagttgtgcatacagccacaaatccgtttatgcttgctttccgtaagaacgaagagattgctgcgtttcttgacaagagggaggaagaggcagagaagccacctgttgagacaccagtagagcctgaagctgaagcctctgtcacctcagctgaagtcgaggaatcggtatgtgtcccagctgaagtaacaagtgaagaggttccctcgtcagaaactcccaaggtagtagaagaagaagtgatagctaccaaagctgaagatgattcgccggaaaaagaagagcaaacggaaacacttgctgcagcagctgaagctgaagaggtggttcctccaattccagaaaccaaaagtaagttgactaaaaatcactagattgtaattttttttgtgtgctacttctcatattggtttattatgatcagtatcagtttatcagaatcatttaaaaagattatacaatgtttgtatcttagaactctatccaaggtaacatatacagctaaagcgttggggatactccaaattatagtagagaccttaaccacataaatagtcacatgaactacgtgttctaaaaaaatccagaataatcaaattcatgaagttttgtttgatggagcaaaaggtgataagaaacatataagaccacaaagataaagacattttagttcattgtgtaatgattactagcattgacccttttcttctaccggtgaccaggtgaagaggaaattgttgagaactctattcctccaaactcagccactgatgaagtttcatctccagaagctttagcaagtgaagaggttgagaaggagcaagtggttgccgaaacacctgttgatgaagtcaagactcctgcacctgtagtcacagaagcttcttctgaggaaagtggcaacaccgctactgctgaaagcatcaaaggtccttcttttgtccatcctttacctgttttacttcctgactcatgacctaatggtttatgtgagattccatctcctaacacaaaaatgtaacaggcatttcaccagctctagtgaagcagctgagagaagaaacaggggcaggaatgatggactgcaagaatgctctttcagagagtgagggcgatatggtcaaagctcaagagtacctccgcaagaagggactagcgagcgcagataagaaagcaagcagagccacatccgagggaagaattggtgcttatatccacgacagcagaatcggtgtcctcttggaggttaattgtgagactgattttgtctcacgtggcgacattttcaaggaacttgttgatgatctggcgatgcaggtaactccaagtttctagctgaaacattttcttcgttttgctataactgagaatataatttgacctgacatgtaggtggctgcgtgtcctcaagtagagtatcttgtaacagaagatgtttcagaagaaattgtgaagaaagaaaaagagatagagatgcaaaaggaagatcttttgtcgaaaccggaacaaataagggagaagatagtggacggtcggataaagaaaaggctagattcacttgcattgcttgagcaaccatacattaaagacgataaggtgatagttaaggatcttgtaaagcagaggattgcaaccattggagaaaacatcaaagtgaagagatttgtgaggtacactctcggagaaggccttgagaagaaaagccaggactttgctgctgaggttgctgcccaaactgcagctaaaccgaaagctaaagaagagccaaaagctgaagaggccaaggaagctgttgcaaggtgagaaattttttatagtctttgctcttcttgacatgaattcttataatgttggctatagaaagattcaaactttttgcaatacggcactgcagcccaccaactacagtggtttcagctgctcttgtaaagcaactgcgtgaagagacaggagctggaatgatggattgcaagaaggcattggcggcgacaggaggagatcttgagaaagcacaagaattcctcagaaagaagggtctctcatcagctgataaaaaatcaagccggcttgcatcagaagggagaatcggttcgtacatccacgattctcggattggagttctgatagaagtgaactgtgagactgactttgtcggaagaagcgaaaaattcaaggaattggttgatgatcttgcaatgcaagcagtggctaatccacaggtaagaaaatgtcctcagctgaaacaatggcataaattggttgttggtctctgacctgaaatgtctacgtgcaggtgcaatatgtttcaatagaggacattccagaggagataaagcagaaagaaaaagagattgagatgcaaagagaggatcttttgtcgaaaccagagaacataagggagaagattgtggaaggaagaatctcaaagaggcttggagaatgggcattgcttgagcagccttacatcaaagacgacagtgttctggtgaaggatctggtgaagcaaacagtggctactcttggggaaaacatcaaagtcagaaggtttgtgaagtttactcttggagaagataactgatgagacagacgaagtaaagttttcaaataagggagctctgttttgtgtcatggagtttaaagtaaaagtcttcctttttgttttgtagacaaaatcttcagtattcacattttgattagtttttaatcaaaacctgtaattttttgttcatgaaaatatgagatttgcattatataaatgtgcatttagtgacaatgtgacattatacactaaattcggagaaagattggttataatgaaattttaaaccttattttaaatagaagtttcaaatgaatttccctgaagaagtgaaactaaataaaataattttttgtttccttttggatattatatctaaatataaaaatcaaaccgaccgaattactacatacactacaataatgtttttttccttttataatttgtgggctaaaaaaggtcggtcggcccattttgagcccaataaaatttagggatagataaagacataaagtaacgaacgatattccgaggttgtcatttgctaaggaaaaaaaaaacgaaaacgtgtgtctgtctcttctcgtagcgtctctcaagctcaggttcgtgaacattccaatctctcaatgcaaaagctcattcgaattatccttctctgttattttcgagatccgatttactcttctttactagtcaattctagggttttgagtattgatctttcgcaatttcgaaattttcccaatttgaaaagataaaaatcttccctttttgtctggatcacacttgattgctgaagtcattgcatgcactgttttgttgtttacagatgaattttgggttgccaagtatatcttggtttggtagcatcagcacaaagaaagatgtagctatgattgattccgtgacaccaacaacaacttctctattggaacagccagagcaagagaaagcaacaacctttcttctcaaacagccagagaaagagaaaggcttatttgatataaagatatggacttggtcctccttcagttcagttcttccttggtctgcaaatgcctctgatggtaagcagaaacccactactatcaacagagggttaaaaaggcatgctctttctcggaggtcatcaagatcaaatggtgtgaatactgtttatcggtttagaccttatgtgtctaaggttccgtggcatacagggacgagggcgtttctgtcacagcttttcccgagatatggacattattgtggacctaactggtctagtgggaaagatggaggttcgatggtttgggatcagagacctattgattggttagatcattgctgttattgccatgatattggttatgatactcatgaccaggcagagttgcttaaagctgacatggcgtttcttgagtgtttggaatcaaacaagcgtgtagttactaggggagatgctcaagttgctcacttttacaaaacaatgtgcattacaggtaactacaatctccttatgcttttatatcaatgtgggattatttcataatttaccttattattcaggtagtaatatttgataatggccgtttccatttggtgatgtactgatgtatcttgaaaccatctatctcgaatgctttcaggtctcaagagcatactaataccctacagaagttaccttgtgaagatacaatacgggcaaaatctactcgactttggctggatagtgagcaacctcagcaagagaagctggagttttcagaaaaactgagacataaggaagtatatcggaggtactctgtcatcccggtaagcctttgtgggtgtcttcactttcgttttgtacatagaagtcataaagaaaggaatctgaggattaggttctttagtagtatagatatatatgtttagtatgaagatgtgaaaacgctagtaagtgttgtgcgtcttgtaaacccgttgtacatgtctagtaataaacccttgtttttgaagtcttttgtttgaatgatataagctctatcaaaggatcattataacttcatttcatggaaactcatgaactagaaaaactattttctatagtaaagtttgcatccaaaacatatataacaatgaaaaccacatccggtttacacactaccaaaacttttatacatatgaattatgaagtcttccttggcaaacacacatacacaaacccatatgtttcattagattgattagagaaagaagtaagaggaagaggccttattagagcttagtagaggctggtttaagaaagatcaaacatcactcctagcacacaaacacacaagaatacttcaaaacaaaatggctattcaatttcttaaaaacatattttttcaaatcatatattatcacataaaagggcttttcctagttcctgcttctgcacttctccatcacccttggagctgcaaaaaaagaaaaagcaagatttgtgtatgaatcattgtgtattcttcatttgtacagtagtgtgcagtaagttcctagtgtttaagaggcttggaaaggactaaattgcatcgttttagtttctccagtaatatatttctttagcttcagaatgtttatagaatccagcgagaagcttaagaaccatgaaagtattagaagggtgtcttagttcaaaatggaccacctttctaatacatcttaaaatcgagcacatgggtgtggaacattaaactagggtttagtaaagaaatactaacctaagccgatagcctcagagctcttcatgattctcagcttcttgcaggagcatataaacattctgcagaggaaaaaacagtaagagagcttcactgatctatattcttctgttaagctaaaactgtgctaagatcattagatatgatctaatacttgatgttaatttacattgttgagattgatcttttaaaaatcaaagacttactcccaagggacatctccgaccagcatccagtcactgtctttatcttcataggttacaacatactcagaaccacgcaagagatcagtcaagcgactctcgtttaacccatctctgccacaccctccatgagaaccaaactgacctgaaaaaaggaaccaaaagaaaacagttaactcaatcactggtattgatctcaaagaaggagagactagaaaacgttaccaatggtgaagcaactgaacatcttctcaagagcagaagagagctcaaggtagcttttgtaagtcttgagatcgattttcctcaagtaaggagcaccttccatactcactttgacatacaagcaaggttgttctggtccagacttagcttctgcttcttcagtctctgagttattaccaggtttctgagattgagaagaagccattgagttcttcctgaatgatcttattggtggccatcccaccacttgtgctctgctcaatcaaaaaaaaaaaacatcaagaatccctcttcacagaaatcataaaacagagcaaaaaagctgagaaaaatctaaaacagagcaaaaaaagcttactttgaagctggagctgtagcagagctcttcttctccttaaccggaacagccggtttagtgaaagttgtcgactttccatctttaacgacggaggtacggggaccagaacccgagccgacatcaccagtagcagtagtggatccaggagagaagacccatttgttagagtcgttaatagcgtcggagaacacccttttggcacctgacacgggacagctactcttgttgagagccaagaatcttgagtcgactcgctccggcgactcagaaccgggtaaaccgagtcttaactcggtagccttgaaattgagaccgttgttattgtctctggttttggttttgtcagacattgttgttgcttccatggttggaaactctgacaaacctatgtaatcatgctctgctgctacagatacagacatttttttcaaatataattgtggacaaacttttgaagcatttagtgattacaaaagaaaaaaagaacagaacactttctgagagaaatgggaaacaaaaaaatttaaagatgagatcaaattgtgagtgaaaatgagaaatgataaaaaggtgtgtgagagagctttatttttttttatttttttacctttaatcttcttttttcttggaatcgtattattttccaaaagtggacggaagtagtatacgtaattttatattcatataaaccgtaattagaagtaagtactttcctcttttggcgggtttaaacacaaaatgttgatttaagaaaatggtacacatgaatgtattgtatatacacgttacgttttgtgtagacatctactccccgacaggtcacagaaagcgtcctgaaacctttcctattatgcccttgtctcgactctcgtattccacgttttgttttactttttacttttgtatttgaaaaaaacaatttgctatctcatgaaggtgtgcatgttatgctatcatgcaaaacgatttagtatctaaaatacgcttttgtatgcaattcctttttgatatatgtatagagatgttgtaatgagtcactaattctgtttagtttggcttaacattatatgttttagattcactagacgatttgatataactcataagttagctcgtgaaaccaatctttactcatgaaattgagtgatgataatgataatctaataacggtgaaccatttaatcatgtgcatgatagcataacatattctataataaatcaaacgtattggagtttaaacttcacaaacttgtataaattcactagtagtttagctaacgaatggagattattagtaagtcgccaataattgcgatggaagatgatatttaggcttgggggtgagaacagagaagagaatctcgaaaaagttttgggcccataggctctcattttttgggtccaccagaagcatgaaaagaggaaagaaacagtaggggtagctctttgccacttagccgcagtagcaatattgagcagtgttcccaaaaagaattgtggtctccacactccacttttcatttttatcagacaatgttttcccaaaatcgagcatatatgctacagtacattacaatttgacctattagtaaaactttgatacttggatcatagtcttaaattaataaaagtttaaatgatcaaatcagatttaactttgatagtatttatgcccatctaatctatctccaagtatattttttaagtggatgactcaatctacatttaaacgtttcaactcatattttaacccatatttattaaaccaatatatctgatgctataacaatataacatgagaagaagtatatgaaatattgtcatttatattctaccagtgatttatatattgtttggctgtattgattaagtcattcatttgtaacaacgataagtatatacatagcaagaagacatacaaaaaagacctgtaagttgcagtattataaaatatcatatgcatagtaatttggttaaagcctgcctctaaggtggatccatctttggatcttatctaaagctttttagatttgtgttttagtgtaagttcgagtgtcttaatcataaggtgcctttctttaacttttcctttgtctctctctttttttgggcaaggtttttgtcgtttttgggacatctcaacttatattccaccttaactcaccatctaatcgtgccattagttacttacaaagctatctaaggatacgaatctttagtaaaaatgtgtctatcactatagaaatcatatgaaggctataaaatctaaagattagttggagttacccaaagtatttacttatctatatggatgttgcatcacatgtggcggttttaattattgttattattatatatggccacgttgggtttactgtattaacaagagacatcataagtaactctagggtttaattatactagcgagagacagcttaagtaacttaaaatgttggttttgaatgtttgtttatagacttgtgtgagcgacaaatacatactataattttatttatttttagtactgatgttatacttaatgttttttcatttttttctgcttttcatcaagcataataattatgactataattgaaaactatgtagttagttgaggatcgaatggaattacactaaacctaaaatgttaaatcagtggacgaccgtacttacagcgttagtgaaagatcggtttgtgtcgtaatcgaaaaaagaagaaaaaaaaagaacaaagagacagtgtgaatctttagacaaagaagccacttaccctccttgatttaacatccatacaagaacctcatgctccattataactcataacctaccatatcgaatcaatccgatggctataaatgattagatcgatataattttttaacctgtcatcaaattagatcgatataattttttaacctgtcatcaaattaaaccgcataatggtaactgccggttttgtttttcttatgcggttattaatttcggcgctgtctacatatagaacacacacacatatatataatattggatcgtttggtggctgagtataatctctacacacgccctcatatatatatactagataaggccgcctaaataggcggatgtatgatataaatttatttaaatatttatcaataatatttaaactttatatagtaaatagtaatctacacactttttctaatatttaatatagtaatttttatattacataaaattttaatcatacacattcaattttacttatattttaactatctatttcatcataataaactattttgttatttataacataaaaactacattcaaacactctgtggaaacgacatcccgtttatatcctctgacaatgtcggacttacaactgttggacaaacatcaaataaatataaaccgagcagtaattaaaacgcatagtttgctaatccattcactatgcgattagttttactatacacatgagtaactcggattatgcagtccctatacactccatcttattaatgatatttgaattttaaatagtaacgtaactctcatactttttcagtatgtaatttagtatttctttaaaccaaatttcaatcttacaaattcgattttgcaatacaatttaaatacctattttaccataataaaatatataatttaatgatatacactccatcttattgttagttttttatataatttaattatatacactccatcttcttgttagttttatattttagataagaaaattgtaagttaaatatttagatataaacatattaattagtatatataaatatctttgttttttagttttctattttcttttaggaaaaagtaaaaaaaaaaatcaaacacatgtcaaaatctaaaatcgttcaaataaccacgtgtcatgatctcgtgagttagtaactttcaaaattgtactttatataataagattaactttttttcttaaggtatttcaaagattgtaatcatgggattcatttgattttctttaagatacatatggtatgggctacattatagaaagtgcttgatattgggagattgactttgtccatcagagtcgacgtttctaagtcatactcaatgatatgggtttacgtatgtgcttaatatatatgcatattgcgctccactatcaagatttatgaagaaaaagaatgctcaatttccacatgatgaatattcacattgttctatttaacgacttcatatactaatttcttctttatatacacacaattttgagtcgaaaaatctattaatcttaaatgtataatgatcttgatatatactgaaaaaacgttgaaccgatcgatggataaatttgttggaaaattagtgaaaagtttgtaattaatgtaactagataaagaaaaaggcagaaactacagtgctatttcggcctcaattctcaaatgatctctagattcctattattgaaaaatgcaatgaagaatggtgtgtacataaaaacgcagcatgatgcatctcttgtaatccatcttttaaactcaatcggctaatagtgaaattttcaatttctttgagtttttactcaatactgatctgatatctagtgaaacaatttctattagtggcctagtggggtttaatatacggattgagatggatccgtcgacagaattttactatgtttttggtgctccttataatgtcaaaacctaacattacactttgctcgaggcccatgcactattcttgtatttatatatgttaacaaaaatgcccaataagatatgagctcattggcccagtaaatgatatcattcgaaattaatcatattctaaaaccttaggggtgatattcaataagtacgtataaaaataacggaagaaaattgtcgtctctaactctctgataattttgagaatatgatcaaatctaccagtgatatcttttaatgttcttatcgaaagaagcaaagacgtacaagtttcctgtattttcgtccatacatacactgagtcactgacttctgcggaagaaaaaaatcatattctgtaacaacaaaaagaattgtcaactacagcaaatagtacagtcaattcacaaatctatcttaacaagtacttaataactaagagataaacacaaatgttactttccgcaatcacaatattaataaataaaataaaatcgtcttactgagtattaatcaagatggtgacaaattgacaaaaaaaaacaatcattcagacaactaaatttctattggtataattcttttccatatatttttaattaatatgagaaatagttactctcttttaagaaaaatgtggacactcgttttttccctgacggcaacactggttaagggtccttgatgtgtaatcgtgtcattaaaaactaataaatgagttaatcaagtcaacagttattattattattattatttattaatacaagttggcattgctcctctcaatgatttaactcctttatgcagggcctataatttaactttcatatgcaatcatactgactttattcctctatatgtaaatattttgttaatgtgtcggtagattttctaatataaattgactaaaacatagagacattggcgtttgtgtaaggctatcgacaaaaggtaagataaatcagccaatcaggcaaaggaagaaaattcaaacaatagatacgagagatatagtgatgcaaaaacatgttaatcttattgtagagttggtttgaatatgggaaaggtcttcaaagaaagctgaagcattcgaagaattttatttagggccagagtccagagataaaaatgaaagaataagattttcatataaatttgattatactttgaactattgtaatattccttgagtgattattatggttgacataagaggccttaactatatatgggtcctatataagacaatttttcataaacaccaagacggaataggtcaaccgcatgtcttctccattgttataatttcttaatacacaaaattacgttaggtgaagaaaatcaagaattattcttgttttacaaattacaatatttaacttatctattttctcaaagaccttattattattttcaaattatcatggtgaaactacatttatatttctagtaataatgcaaaataataataaaaaacaagacgacacactaaatgactatattggtcatttatttgtacaatcgactaatgttacatcgtaaatactaaatatgtgggttcgatacaaattaaaattggataagaaaggataaacaatggttgacttcgtttgaccctcagtaattacgatagagtgacgtcataccattttcacaaaattgctggccatttaaatcagacagatcaaaacgaccctaaacaagaaactgcattgtccttcatttttgtttttggtaaatataaatgcaatgttttaaaaaatcgcctcttaactttgttgctatccataaaaaaaaaaatccaaaaggggaaatttttaatataggaattttttaaactattgaaatttctgtaatgtaaaggttgaaattttaaacatcaattatgttgaatgagaaagaaaaataaaattaagcattgttgtctaatctatatgaagctgaaagaggtagtaatcagatgtgggcgcgagcacgtaacatgtggcccaacatgtgggcccaacggtgtctctgaaaacatgatacggtcactttcacgtgcaaaaagcccaacgtgtgaatacagtttttgttttaagcccatttatcattggccccacacaccggcctctccaaatattattcaccaatttagaaacgcagtataattattatattttgaacccaaaaataaataaattgaaaaggctttataattatttaaatgaaaatattatgtataagctattcgaaaaacaacgaacacgactcggtaagttttaaaacctctaaaatttgcttttgacataaagataaaatgaatcatttcttaagacgtaatgataaaattatatataatatagcaaagactaataatgtgaagttgaagcttatacgttacaccaacttgaaattaaagctaaattatgaagtctttatttcataatcctaaagcagattgcatttgaaagcaatacaaatcaaacttttagtcagctccaccaaaagttggtcgcatttaaatccaagagtaattaggctcttaatagaagtttaatttgacttagttttctcatgatgatgactccttgcatctttatccaaattgcaacaactaatgtttagttgaataagtaatccaaccttttttttatttggatgatagatatacgtatcaattacagaattatacgtaagtattatcatttcttttcgtatccagcctcagtctatttccgtctatataattatcactaaaacaattttcttaaacatgtctattactaaaataaataaagctcaacttctcaaaattgatattccttaattatataaacacaagatatctcaccaaattacctccatccataaacatataccactggattgatcttcgtttgtcagtgatgtagatgcataatatgaaaccttgaaacctttaacattgtattaagaactcttcgtatagcacatctcgactatgtaatttatcttgtgtaccttagcatccatttgccttcctttatgtgatcaagtgaaggacaactcataatcatccttgtaactccaagaaaatgagctaagtcagaaaacataaaaatagtaaataaacaatttaattttctgtgtttgatttgtgtatacaaacacaaatccatagataaaacatagatccattttataaagtcaatctagaataacttgatcggacttaatccatcatcgtatagcgataagtcatggcaactaaaagtcacaacacaaggcatattttattttcaataatcaaatgtaagtggaaatattactctttttaatttatgaaatagaaaacggaagaaaatttcaatgtataaatcaagtatgtttgccctttctttctttcttacaatcaagttgaatttgtttagtgaaagtagggaacgctagtggacaagttgattcgatgaagaagagcattttattttctaagaatcggttatgacgtacatgaattttaaggttgactctgactccctttgtcttgtcccttttatagtttctcatcaaattcattcccacttgtggtgaccccgtcagtgacatgtgcgaatcttaatcctttctcgattttaaaatccagacatttttatgtatagtaaaatggtcctttaatgatatcaaaatgaactgtgcctagtaaaaaaaaaacatttttattcgtcaaaaacgtggtttattagctttctctgttccactacagtttctatttttacagtttttactgtttgctgagagacagagagagaaaataggcctttgcacgtgcaggccatgtgggccaccgacccaaatcagaatttcatacagttttgtcttgtagtaaaaagcaattgggcctttaaacatggcctgttccaaaaccattgcgatccacgggttttccagtcacatgtttcatcacgtgaccaaaaatttgttaaacttatattttgcatttaaagtataaaaaagcgatctctaaaacgaattttcttgttggcaaaccaatttcctataccctggagggaaagaagtactcttaaaagcggtggcaatggctctaccaacttatacaatggcatgcttccttctgcccaaaacagtatgtaagcaaataatctctgttctagctgatttctggtggagaaataaacaagaggcgaaaggtatgcattggaaagcgtgggatcatttgagttgttataaagcggaaggaggcattggatttaaagatatagaggcttttaatttagccttgcttggaaagcaaatgtggcggatgctttctcgaccagaatcgttaatggcaaaggtattcaagagtaggtactttcataaatctgaccctttgaatgcaccattaggatcaaggccatcttttgtttggaaaagcattcatgcatctcaagaaattctaaggcagggtgccagagctgttgtcgggaatggagaggatattatcatttggaggcataaatggctagattccaaaccagcaagtgcagccttacgaatgcagagagttccccctcaagaatatgcttcggtatcctctatcttaaaggtgtcagatttaatagatgagagtggtagagagtggaggaaagacgtgattgagatgttattcccggaggtggaacgcaaattaataggggaacttcggccagggggaagaagaattttggatagttacacttgggactacacaagctctggagactacacggtgaaatctggatattgggtgttaactcaaatcatcaataagaggagtagtccacaagaagtatctgaaccgagtctaaaccccatttaccaaaaaatttggaagagccaaacaagcccgaagatacaacactttctgtggaaatgcttaagtaattccctccctgtggctggtgccttagcgtatcgacatctatctaaggagtcagcctgcataagatgtccatcatgtaaagaaacggtgaatcacttgttatttaagtgtacttttgctagattaacgtgggctatctcttctataccaattccactgggaggggaatgggctgattccatttatgtcaatctgtattgggtttttaatctgggaaatggaaatcctcaatgggagaaggcttctcaacttgtaccttggttactgtggcgcctgtggaagaacagaaatgaactagtctttagaggaagagagtttaatgctcaagaggtattgagaagagcagaagacgaccttgaggaatggagaattagaacagaggctgaaagctgtggcacaaagcctcaagtgaacagaagttcttgtggaagatggaggccaccgccacatcaatgggttaaatgcaacacggatgcgacttggaatcgggataatgagaggtgtggtataggatgggtcctccggaatgagaagggagaagtgaaatggatgggagctagagctttaccgaaactgaaatctgtattggaagcggaactagaagcgatgcgatgggcagtcctttctttaagtcggtttcaatacaattatgtcatctttgaatcagactcacaggttttgatagagatcttgaacaatgacgaaatttggccaagccttaagccaacaatacaagatctgcagaggttgctctcccagtttacagaggtcaagtttgtgttcataccaagagagggaaacacattggcagaaagagtagcaagggaatctctttcttttttgaattatgatcctaagctttattctattgtgcctagttgggctagaagtagtatggattgatatctctttgtaagaacgttggataattattagttgttgttgagccaaaaaaaaaaaaaaaaaaaacgaattttctttagaagaaataccaatgattaagatatctatcatatgcgaagctctaacatagaaatcagctcaaatcaagaagtcacatttgtatcatcacaaatccacaacatagaaatcagttctatcatggaaataatgaatgtacaaagaaaattttctccactacactcataagtagaaaccgttatatgagttatagtatgcatagtcaaaaactagcatgcaacagtgatctttaaaacagactgttgaaaaatggtaaaaattaacatgaatattaacagattggtatgtttttcaatgtatttggatgtgtttgttcttttttctcatttttacatttaatgcaagttaaattatatatatatatatatatatatatatatatatatatatatatatatatcgaattaaaagatgtctaaccgattatttgtttagccgtgttaccatccacaaaagtagttgtctacctttgtaggcgaggaaagtaattagagttcaatgagtggagaaaaaactgcaaaagaaaacatttaataataattagtaccaatctgttgatattcatgttaatttaaaacatttatatatatgaagacaaaacaacaaataaaaaaacacaaaaggcatgattttaggggttttgggatctgtagcttaatcacacttattctttaatttatatgttaattattgagagtgattgaattatattttttaataatctatggccactgagatgtggtctaccaataaattctttgtcaattatatatacagataaatcatatatgaaaaaaacaattatagataaatcatacatatacttaattcaaacatagatgctaattataactgaaagagtttacccatggttctacaacaaaacatataattgctttacaaacacatttgatattaaattgttttagttctattaacatcacttcaattttcacctcaggtaaaacgcttttttgttttgactaatttgggggggggggggggggggggggacttgtactaaaatttaacaatgtgtgggatacataatagtaaacgttatgcgcagaagaatccaattgatcgaacagcatttgatggggcaataaacgaagtgtgttatagatttgagaatggagtaagaagttgcatttgcaagtttaaaaacggcctattttcgtcatatatttacttcaagtagaaattcacatatccgtaaacaaattcacaaacgatgacggcaacttatattttaatgtagataattaatttcacaagtcgtgccaatacgacaattgtgtcggcttccttccctttaaaaatgtttatcttttcctttttaaattattgtttctgcttagaaaagtatccttttcacagttaaagacttaaagccgatacatattattgaaataaaatagacacaaagttaagtagatgtattattatgtatacatgttatcgggatataaaaaatatgatggagcgtaggataaatgtatttaaaatcttattttatcatctatgtcattaagatgcatttaatttttctctgaaatgtgagtgattagaacaatttaaacatatggatataactttcatgaatgtgataccgaagacaaacacgaaaatgtatactatttgatgatatgcagattcagttgacaactctttaaagtttcttaacataacaaagtgagcgtagaatgaaagcgaattcaatgactgagattatttaagcgtgtagatccatagaaagaggtggtcgatacgtaacaaactaacaatacacacacacacatatatatatatatatataatatgtattattaaataaaatcttacaaatgatataattcatttagagttatattatctatttacgtatattttgcaatatctctagatttaatcttctactccaaaagtatagtacatgcttactttacaaaagaaaagggagctaatttttgaaaattcttgtggattgtgattgttcaattatatacataactacaaagacatacgggcatatatcccacaaaacgtctcaaaattctcttacgtaaataaattaatttacaaatatatatatatatatatagttttgtttatagttttgtacgtttcgtatatttactactatagttatatactttactatagacttaattaatagcatatattgaaagctttatacaaccaagaattatactcacaacaaatttggttagtccatgttataatcaaatttaaacgaattagattctgttatctacctccaattttagtcttcttaaatgcatgactagaagtaaacaaataatctgagtttttttaattaacaatatgtcatatgtggatttaataatacgttgtattacaatgacagtacgtattaactcaaattactatgttagctcttggttaataaagaatttgagttcatataaagaaaaagtatataagtaattttgaaaataaaataaaataggggtgatggaggaagacaagaaagaggaatttggtgcttggtgtttgtttgtaagcattaaataataaaaggagaagaactaagaaacattaaataaggaagagaataaatatgggaagaaacgacacttcctctccgacaaagattttggaagcgtgttagaaagaaaactcaaccctatttgaatcggaaggaccaatttgactgtggaccaaattgttagcattagatttgatcccacagtttaagacttccaattactataatttagtcggtaaattttgtagactattttttttgaaaaaatattgttctaagacatgcgagtattctgttaatataattattactttttatataatagagaactccaattgttgaaacagattaaaacaaagatttggtgtagaagatgatcaaatattacatgaaagaaaattctgtagttcattcttgtatatttttataagatatttagttatattatttatttgaatgaagaaagaaacaaacaaaaatgtaatattttgagatgtctaaggagtattaagatgtccagactaactttaaatttttctccgaagatttattttgagattttttttcgttttaatatttttgatcagtttatgacgataataaaaataaacgaaacttttcttaaatctatagttgggaaagtgattgattttcgtaaaaaccattttccaactaatataacatatgataggaaagtagtcagaaaaatcttacaaaaatgtgcatggaaatggtggaatttacaggtagcattacacataatcatttcatcattaaatgctaagtttatccaccatattggcttggttacagagtctaaatagaaattgcaagagttacatcctagttttgtcaaactttggactacactattacagtttcgcctcttgtaaagaaaaatcgttgaagagaatttcgatgaccagttgtgaatgtcctggactaagttaaagatctcacttctagttgtagtcccggtaataaatacgaaatataggattgtattgtattgtatgttttctgactcgtatattacaagtatatgtaaggatttcttggaaattgaaatcactgggaaacagaatattagggatctccaaaccctaggacattgattccttcgagattactggtcttcttcgttgtaggcaaaaaaaaatggtatttattgttaatttgtatttttctgatcatgcttggacaaaaaaaatgactcgttcaggttagaatttaaaattaagtgtatgcgtcatatgacacaatgctctcgtcatcttgtgtctaacagagtgaaataaagaacgaacaattgtttgtatacacacaaatacaatcgcacctacatgtgcacatattttattacgcttatctatagaaaactgtttgatacattttttcattctaaagtaaatacacaatccaaaaaatactatgtcatgttaagaatgtttagtatatctatttattttaggacaaggaacatttaacatatagtaaacagttttaacaaaatttctctgatttgaaatatattttttatattatcagtaaaaagaaaactgtaaaggtaattatagtcgttgattaagattatacttagttttttaaaataacatgttttaaaaattttgcaaaataagtttttttttttacatgtctcataatttttgtcctcagtttatgttaaaaatattttgttattttgatactaacatcttccatacgctgaaaacatctttgagaatatttttcaaaacacaatatacaaaaatccacagtgactttattccacgatgaaatgatatcaagacatatatgttcttacctttacctttcaacgaaaatgagagaaaaaatatatatatatagtatcacttttagaaaatgtttttttttgctaattaattattatataaaaatgttgagagcaacttgatcatatatgtaataaagtcgcagtgaaaaaaaaaatgtaataaagtcgcataccgacgttgtgactcgtttttatgtaattgattagttaagtacagagttcgttagatgtatttgcattgttacaattacagaaaaccctacgcaacacaattcagtactttttacgtcagcaaaaatagaatctttcgttgaaaataataccagaatcgttcttgtctttaattttcttacctttttgtaattggatatgatttttgactatggaattattattattttattctataaaattatagtttttattattggaatcatttataaatgctattactcagtgttctttaaagtccatactaacgaattcaagtacttatttaacaaaacaaaacaaacaaatactaataaactaaaagtacaaacattactatgttattaaaaaaagcatatagctgcgtgattttaaaggtatatgtgacatataatacaacgacgccgtcgtattttattgaatttttttgtcacttttaattagtatacagtgaggaaataagcaaaaagaaagaaaaaaatattgttggctcggctagtacctataaataaaaacactagtatttggcccaggatataatcattgcaagtttagaactagttagctaatctaaaccgttagatcaaagaagcaatcttactaatcagaaaaacaaaattcaacaagttacaagaatgaaaaaaatagggataaaaaaaaggataattcatttacattcgatcaaaaggcgaatgcatagatcatagatgcaagacacttgtgagttgtgatataaccaaaaatttatttaattatatgtaatatatattcgaaaaatttatacaccgtatataaaatattcgaataatccttttctttgatttaaaaatattttctgcttgttttctcaactcatgtattaatttaaataataaaagtagctaccacctttctctgccccactttaagataaagctaaagcatggaaaaaagcatgggaaaaaagtaaatatatgatatacaatcaaataaatctaaaaaaatagaaaagaaaaattaaaggaacgaaaaaaagagggaggaaaaagacaaaattaaaaaacaaaaataaaaattccaaaaaaattaacatcacatgttatcaaatgagatcaaaatttaagttagttttgagttttctctctctttctcttctctaaaactacttaagctaaagaatcaaacacttctcaacgtttctccaaagcctctgattagtaaacacataaagagatctatagagagagagagagtagagataaaaggtgatgaatagaggtgtgttggagagttcgccggttcagcagctgatggcagccggaaaccctaattggtggaacgtaagcggcggcatgaggccaccaccaccgttgatgggtcatcagcaggcgccgttgccaccacatatgactcctaataacaattatctccgaccacggatgatgcccactcccttcccgcacttcttgccatctccggcgacttcttcttcttcctcttcttcttcaccgtctttgcctaataaccctaatctctcttcttggcttgaaagcaatgatctccctcctgagtcttggagccttagccaacttcttttgtaactatccctctatctctctccctctataaatattccaaaatgaaatattctctatacgcacatgacatgatcttgtgtttacttactagttcactctttgttttctcgtgtgttgctacttagtcctaattacctttttgttatacgtatatacgtatatacatgtatgtgtttgtattttaagtatcaaacaaacaatctaatattttggatattttctttgtgaacttaggggtggattgatgatgggagaggaagagagattggagatgatgaaccatcataatcatcatgatgaacaacaacaccatggttttcaagggaagataagattggagaattgggaagaacaagtgttaagccaccaacaagcttccatggtggctgttgacatcaaacaagagggtaacattaacaacaacaatggctatgtcatatcttccccgaactcacctcctaacaaatcttgtgttacaacaactaccacaacaagcctcaatagtaacgacgataacatcaacaacaataataatatgttggatttctctagcaatcacaatggtcttcacttgtcagaagggagacacactcctccggatcgatcctctgaggtaacactttttccacatctcagagattttgataatatacggaaaaagctcggaaataatatctagttttacacataaattagtaaacacatcaactactatgaaaaagtgaaatctaaaacgtcatttaaaaagatcaggacaacatattttattttaaggtttggatctaaattcaacacgcaaccaggatgagttttgctctgaattttttttgattaaatgactaattgatctttgttttgtttgttatctatatatgtgatgcagtgtaacagcttagagattggtgggtctactaataagaagccaaggctccaaccttctccttcgtcacaatcaaccctcaaggtaactaattgattatatcaacgaaactttggataacttatataacgttttctgtatataaattccctccctgacatcatactaacaaaacaaaaacacaaacacaaaggagaacagaagaagcaaacaaaacagaatgggcacagaataagctgtgtggttttgtgttttgtaactcttttgttctctcctgttttgtcttcttcttcattcttcaatattcctttcctctctttatttcataaaaatcaaacttaaattaataaatttcaacattctccttagaattagacgacactatatgtaataaattttattttatagaatatggacattttgagagatttcaaagttctgtcaaaaaaaaaaagagatttaaaagttttgtttttttctgtaacttgttttgaaacgtagaaatggaagagtcgcattagacattggattcaataatatcatgataattatatatactagtgaaagtaaaataattgtttatcacttgtacatgctaagtaagcacgttttctctatgcatggtaattagtaaaaataatatgaccacacatgcacatatatatagaaagctttttaattgatgctattaattaatctatggtggtaattaaaggtgagaaaggagaaactaggaggccgaatcgcagcgcttcatcagctagtatctccatttggaaaggtaaagatcgattccattaacaaatcaaatttattaatgtcgtctaatattcctctatcaaatcaacttttaacattaattgtggagatttttttagtttcattcttgttaatctaaaatctaaatcattcttcatccctttttacccatcttttgcagactgacacagcctctgtcctgtcggaagctattggatacattagattccttcagagtcaaattgaggtgtgactcgtcttttccaaactccaaatattctcattcagtaaaataaaaataatgcttatgattactccgtttaccaaaaaaaaaaagaagaaaaaaaggttgtgattactgagaaataaattacagaataaagcataatgatattatataagaaagaataaagatagtagtataaagttttgttctctccatgttaagtaatatttgattgatgtgattatatataaagtatttatgactttttgcaactgttgcactgttgcaggctctgagtcatccatactttggtacgactgcctcggggaatatgaggcaccaacaacatgtaagtagcaaattttcgtatatatactgatatacacaaacaaatcatcatgctatcgttttatacccttaacttcttctttttcgataacctacacgaaactttttatacttatatattatctcttaagtcttaactatggtttatatgaatagttgcaaggagataggagttgcatatttcctgaggaccctggtcaggtacgtccattttttcttggtcactatacttttaatatataattagagtcactatactttttattggatcaattgaatccaaatctaaaaaatgtggacagctttagtttccaaaatttatccttttttttcttttgttttttttcttttctactgttttctttaaagtaaagttggattaatattaaaagatgcagcggccagcttttttttcaccctcccttacattattataaaccaaaaaagttcgttaaaaccaacaaagccactaaatttatttaaatatcaactttttctccttacttgttttcttcatctaagtgaaattcaaattcctttggcggggttttatatatgcttttcactaggggaaattcaatgattttttttcttatcacctctttatataggtgttagagaacatgtgtttactttttttgttaatcaatgctatatatcatgattgtttttttttttttttgatatggttttagctcgtgaacgatcagtgcatgaagagaagaggagcttcgtcgtcatctacggacaatcaaaatgcaagtgaagagcctaagaaagatctgagaagtcgaggtttatgtcttgtcccaatctcatgcacactccaagtaggcagcgacaacggcgcggactattgggctccagcacttggctccgccggtttccattgagccaatgaaattacgccacgtggaattccagcgttagagaaaaatgatataacatcacgagcagtcagtctactgagaaaacaacaaattgagtttccaaggctgattgctcatgatgctatacaaagttcttcgtttaaaactttgctagagaatttgcgtctggcgtctgatgaatatgcgtttggcgtttcatcatttgatgcgttatcagatgatatgaccaagtgatcaatttatgttcttgctttaggaaactgtttgttttcttttaccggttaattgtaatttgtggttaagtacttattttaattacttccacgtggtttgtatcgttataattttgctattacttataatatgtctattgtgtgggatatatacgacatgcagaccattaaaataaaaaagtgtgccggaaaatatcgatataagttacttcgtttgcctttttcatgcgtagttcttaattcacgtaaatgatcatccacaatgaaaaaagaaaaagaacgaaaaagttcagaaattatgaatcttattaattattattgataattattttacttcactccaccatatgtgtgaactagtggagccttggaggatcactaacaaagaagaaaataagaaacaagatatatcatcactttttgagaacttgctcttcatttaaacggttcatttcttctctttgaagttacgatcatcaaagaacttcttagggttgctctcaaaagcctccctctaaacgctttgtcgtccaccagatccaggagcaaccattgttttaccgatgtcggaagtgctaccagaaccaccgcttccgccactcgtaccaaaattcttggctccatcagctttggtgttcttggcgtccatggcttgattttgggattggaaacgattataaattgaaggtttggttattttgtgaatcatgaattcgactgttgagacttagaaaatggatcgtatatagacaccaagttgatctgatagaatgatagtaatttgtgagttgtaacaacacgaaataatggtcaaattggcatggaatgtaattactaattactgatgttatttccatgtcaatttgtaacaattttctcgtaaactaaaaacgctcaatacaacagacacggcccatctcttaagcccaaccaaataatctttgtccagttatcgcttggctcccttattcgatgcgtttgccttacgagttttgacataacacgcacttttttaatacgcatgtggttcgagtaacgccggttcagttttgtcaattaaaatctataagactataaatacatcgttttggtagagtactattcggatcaataattatgcattgttttcttatgtgtaaaagaatgcatgctccataccaataaacaaacatatgattaatatactttatcttttgcagtggatgatgtggatcatattattgaggaacataatatagtggattaaggaatttatccataacacccgatccaacaacaaattattatattgatcaaataaatcatattattatgtcgaaaatgacaaaataaaataaaaatccattacttcacagaaaactacagaatctttccacccataaaaagcagaccatcaaaagaggaaaaaaagtagaaaatccaacgtttattcatactataatgttgaatgatggaaaaacaaatacagtgcaatattttcagttatatatatatacacgcaaatagcttatggaattcccatattaattccttagtagacggagacgtacaggtggctataattggcttagatgccttcacgtctaagctcttaaggtttatggcccatttcaaaagctcctttaagaaaatcccaaaaaaaacgaaacataaattaaaactaattaataacaacatataaactttaaagtacatttaaaacaatgaaattaagaaaaataaagtactagttctcattttataaaagaaggctaataagaagattaaattataatatctttagcctcattgatgggattagatatagatgatatattgatatacatattgttggaaaatggttttgtgaaggaaatggaattggtgtgtcgttttcgccaataattagtttatagttgaaaactccatgcatgtcgcttccacgtattcttcctctaccccgacgtacacgtgttgtcgttttcgattcaattttgtggctaccggctattagggtagtactacaactacataaagaaaaattcatgggtctaaacaaattttcattacaagatatagcatgtcatcagactgtatgggttatattcgatagttatgcacagaatatagtgggtatgattggagattttttactgttgcagtaagaggtgtgctattttatattgtgactacagtaaaacattcaattaaaacaagacagaaaaaaaaaaaaacttatcgcatttatacaaattatataagcatcagaacttttgggtgtacttctccgagtggagattctaaaaaaaaattattcagtctcgtcgacaatcttggatcaaaaatgttttattacatagattttgatatgattccataatttttgttttgatgatatattttttaagggattgtttctgacatgtgaatttgctgtcgttatgaatttttgattaaaacgttactaaaggacaaaatatgaaactttgaaatagactaaaacgccttttggttagagcttgttgttattagtgtagattccatttgaaagtataaatatcaactacaatggaattgtgaggggtccatttgtgaagtaacacgtataagaaatttctaaagacaacaaagtaaatgttaatcgccacgtacgaagattacatttcctttaagttgttggatcgccttagtggctacggcaacggtctaaatttgctatcaacttttaagacatgactcaactcatatatcctattagttttatagaaagctttggagaacatatacacttagggacaatctaatcatagttaatgttgcatttcatttgatttggacgtgatgctataagtgctttatcaataaaatgtgtgaaatttttaattgttaaagatatcaatttttttttgttaagatatcaatttaggtttccatttttctgaatctctatataatatataaaatggcaaacataaatttgaagaaaatcatcaagtccagatgttattttcactttttatccacatataaatttcctacattacctttctatatggttttgatatatacgtacgataatatgtatacgtgtaaaaatacaatcataatttcaaacattacatgcaaatacattcacatcttaagcaaatgcaaatactataaatattctatatactgtatatgttggtttccgaccatgctatgacttacgaagtatttatcacttagtgataccaaagtatcaagggcagatttcatttgcaatacattatccgaagatctaactcgtatgaacgcgtgatatttcaaattcttggacatgtgttttctaatttatttaaagactagatatattatctgcttactgtatctagctagtccattttagaggtaataaaaattaactaagccttaagaaaacgatattttctttaattctgaacaaaagctgtaaagttattattttgttattagcaaaactactcactaactgggtcgaaaaccagccggccaaatcggtactcatgacaagctcacgaatgatatatcatatttggtttacttaatgcatactctatacttttaatcattattctatatcattcactttaagaaaatcttaaccaccatagctacaattcggttgcttactctagagttaaagctccttttactctgatttcgttttcatcatctaacggttagatctgtacgtgttttgatttgtcgatatcttggttctaataaaaaaaatgaaaaataaagaaataaagcaattaaatcatacaatgaagacttcttccttctttttttttgccatacggagaagacttcgttgttggcgactactccaacctcttaataagaagaaatatctttttctctaaagttgtggttttaggttatttctctttctttttatttaatcatgcaatatcttttcatataattatattattttttcttatcctttaaataccctctacttcctctctccaatgacaatccaatcttacaagagtgagacaagcaaaaaaataaccaaaaataaaaaacattctctccaaagaaaatagtaaaaatggaatcttcggtaccaaagagaggcttatacatggaaatggaacaaaacgctcaagtggcagccaaaaggctttggaaagtggtccgcatcgtcttctgcgttttaaaaaccggtacggtcaaaaacaagctcatgcttgacttaaacctaatgcttaagagaggcaacaaagccataaccaacctccgccgtcgatctagctccaccggcagccatgacgtcagctcctcctcacgcgtccgtgactacgacccttttgcctttatctccaaacgcaaacgccgcgtccacggcggttatgacaacgaagaagatgcggtggaggcagcggtcaagaaagtttttgagttgttaggagagaatgataagaagacggtggcgacagaatcggccagagagtcgccgctgataatgtccccggcagtgagacagctcagggtgacggattcgccgttcccgttagacgacggtggagatcacgatcatgtggtggacaaagccgcagaggagtttataaagaagttttataagaaccttaagctgcaaaagaagatgactaacgcattagagtcgccgtaccacgatggatgggttagatgatccaagcgtttagagaccatcgcaaatttaatcactagcgttggatcaacagaacaaataaggggacaattgagaatacatgtataaataatggggttacaacttttcttagatatatgttccatttgagtgttgaatacttaaatttggcttgtgtttatttcgtcggtagttttgatgtaaacatggctatgtatatattttcctatcttaatgagaagaatactatatacactaggtgaatttattgatgatgaatttatcaaatcaaaaagtagagaaatgaataagataaaatatcgctctcattctctcaagttgttcatcgaccaaccataacgtttcgtgcaatttaattccgatcatatatatggagaattgcaggcacagataattattacgacattattcaacaatacgtcttcctcaagtatttaaacacgcacaacgtctttactcgtacatccaaagacgtagtcattttttatatatactgtagtagtctaaaattattttggtgatcattcgagtattttgttagtccaatgtttatttgacatactagtcaagtcatgctctcgtagttaacacaaacaccaaaagtttctgggcttcaccttcacaacactcggctttaccttctcaaccacagtctttaccgccaatcgctcatttccaggctgctcttctatttctataattcttcgtgtgagcttctccactgaatcaccaacgaccacttcagtgcaagttgattcttggggttgttccactgctttggatggtatacatataagtatacaacatgcaacaacaacaacaagcattataaaatagagaaaagtatcttaaagcatagatcatgaaaaagatgatagagaaatattcttacaatgttgaggttgtgttttaggacaattctcgagaacccacaaatatctcaagacaatggagacagagagaacaactacgatgatccatatacgtgatataatccattcccaaaccaaatactggatcaaatcccaaacccaaaccaaatactggatcaaatcccaaaccaaattctggatcaaatcccaaacccaaaccatgtctttctttttcttctaaattttctcaaaacatgaaaggttataaaacatctatcatttattttctcatgcttgccttgttaaatgcccattgattatctatcttcttcaccactagcacgcttgagcctaataaaccaagtttaaccgaaccaaatcaattttctaaaccaggattacaaacccgacgtcgttaaagtactttgacgaaaaacacctccgaagaaactcaaaattacgatggtataccactcaactttcgataactactagaatccatcaatcaccacaggaaacaatgccacttctcctccgtcgatttccctctccctccgtcgtctcctccttcttcctccgtcgctcaatggcttcctcaacaatctcctcggatataatcactccatcaaacaccaaaatcggatggatcggaaccggagtcatgggccgatcaatgtgtggacacttaatcaaagccggttacacagtcaccgtcttcaatcgaaccatctccaaagctcaaactctcatcgacatgggtgctaacgtcgccgactcaccaaactcagtcgctgaacaatccgacgtcgttttcaccatcgttggttatccttccgatgtccgtcacgtccttctcgatccaaagtccggagctttatctggtctccgtcaaggaggtgttctcgttgatatgactacttctgagccttctttagcagaggagatagctaaagctgcttcctttaagaattgtttctcaatagacgctcctgtctcaggtggagatttaggagctaagaatgggaagctatctatattcgccggaggtgatgaaaccaccgtgaaacgtttagatccgttgttttcgttaatgggtaaagtcaacttcatgggaacaagtgggaaaggtcaatttgcgaaattggctaatcagataactattgcttcgactatgttaggacttgtggaaggtttgatttatgctcataaagctggacttgatgttaagaagtttcttgaagcgatttctactggtgctgctggttctaagtctatagatttgtatggagataggattctgaagagggattttgatcctggtttttatgtgaatcattttgtgaaagatttagggatttgtttgaatgaatgtcagaggatgggtttggctttgcctggtttagctcttgctcaacagctttacttgtctcttaaggctcatggtgaaggtgatcttggtactcaagctcttctcttggctcttgaacgtctcaacaatgtctctgttcaatcatctgactcttgatttaggttctgttccactttctgataatgcatctgttggagattttatgttgttatgaagtaaagatttgatcttttgtgtacccatttgttggtaaaacatgatttgaagtaaacttttgtgtacgcatatgagattcatacacagtagttttatgtgtactcaatgatgaggaaaaatgaaatctttatatactcagaactccagtgaagtgagctttgaatttgtagtttttacaacatatctggttataataaaatcccagaatctgaagaactgagtcttttatttttgaagaacatgaaaacaaatatttctcccaaggaaacttatttgctacaaagaaagtcttggggaagagtaaaaacatggaatgctttcttttatgacgccttagaacttggcttaggcgttttctgatagcgaaaagctttcagtaaattaccgaaaaatggcgctctttgggtaggttttaagagtcttcaaggtagagagagtgagaagcagcaagaagcgcagctccaatgcctgatccatcattggagtgagtgacttcaacgcttcctgaagcttcatctccaagcaactcttttagtgagctctccatacactcactaaactgagtgtaatgctcaaacaatccaccatccatggctataaccgatttctgcacctcctcgtctttagtagtatctcttcccagtttcttcagaataccatagattccagcagcagagagacgagctcctcgggttgctatgatgttgcagagactgatcacaacttttctcattttcagagaagttgtagggacctccaatatatccttaatcttgctcccaacaatcttcaagtctggagaagtgtcgttgtgcatagccgacatgtgaggagtcctgcaaatgattgttgaactttagactaaagcccttcctcaaaggatgaaacttagtaaagagtacctaatgatgaatggtattctcagcttagatgggactgtatcgccaaagaaagcagcatcttcagccatctttagaagaactcttcgcaaaatctctcccaagtacataccggaaatgattttctcaagaatctgcaaaatgaaattccacatagaaactcattctcgagacacctcgtaggtattggcattttgtaacaacaaaccggggtttaaaaactcgtacctgttcgcctggattcagactctcgaaatccagcgtgtgatcaaactcggttaatggaagatgtgatgacctgaagtttccccattccatgtttataaccatttctcctgattttggaagcagaccatgccatttagggatcgcggttgcacgctcaacataggctgcgtttgtcccagtgcctaaaataacagcagcaacaacatccgggttatagtatctaccaccggctagtgttccaacggtatcattaacctgtaaaacgtcaaaaacaaatcaacaaacacatgacaaaagggattcactagagagcataaggcgaaagagaactcacaagtgctgcgattcgcatgtcaagaccaactctttccagagccttattaagtgctccaacaacatcttgtccaacctatgcaacaggttaaacaaagattaaggcaaaggcgaaaactaaacattttaagtgaaatagttgaacgaaaatcgagcttaactgcttcttcgatggaaaagccttttgtccatttgatgagactaccagaggacagagaagtctgcttaacaggaaacgagaaagtgaaacctaattccctctgtctaccttctggaagatgaaagtcttcgcattctgtagcgacaaacttcgcaagagcttcagctataaaattgaacaactcctgaatccatcaaaagaacgcaaaagaatcttgttacacaaagatcatctaagactaaacatgacaaattgaagaacagaaaactgacatctgaaccaccagtcatcaaatgaggaggaatcgaaacttcttcgaattcttgtttaacaacacgctcttgcttcccgccaagaagcacacgcatgacacggaagtttgtcccccctaggtccaatgcataaaagagacccttttcatccctgttatattaatggtagtaaatgtaagacagacctacaacatgaaactagacgcattgccgcattggctaacaatattaaagcgaaaatgaaaccgcaccaaaatgttctacgtaatataacataatcaatgccatcatgccatctaatcacgaagtccataagacaaaagtgatgtctgtggacagacttttcagacaaatcatattcacatcactgtcattgtctgccttaatgtaactatgtattaaaccttaatcaaaagggcaataactctcaaatccatgaaaacaaatctacaaaatcaagaagtgatacaacaaaacctataagaaaatgagacaatgattcagtgggacatgatctggattccaaaagattcactgattctgaaacagtagatcaataatcctatctaatcgatcaattttgaccattaagagacaatgcaattacatctccaaatcaggacgaaactcatttcataacgtaatccatattacacaatcaacaacattgaatggatgacatattaggagatagaaatattctatcttctaatatgacaaagattgaaaatttcaatgaaaagcaacagaatttgaatccaattagaaaacattacccggaaggaagattatcaacgtagctgataagcatcttgagtttgctaccaccgtcggatgcaagaccagcatgcatctcaacggtcatagcatcagccacttgtctcagtttcgagatcggagtcgcacaatcctcttcaaaggccttgaggatagccaaaacacgtccccacttccctgagctctgcatccgtcgtcgaacaaccaaaacagccaccgcacaaaccgccgccgtgcaaacaacagtcgctccaacagctactttacccatttttccgatttggaatcaaaaacaaaacgaatctaaaagaaagatcggatttttacgattccgatcgcaaaagcaaggattacaaatgactaaaattgacaagccagaaagaagaaataatcaaaattttggagtgaattgagagaaattagagaaacctaagatggatctaataccgatctactcgagcttggtgggttcgtcaaaaacagtgtagaaaccacgtaagcgagagcttctctcgttcttgtccgtaaagtatggaaaaacaaaacaagaagtggtaatagaatctgttgaaatgacgaaattaaccttttgtctaatttcggtttttatccttttctccacctaagtttctggtagcaccaatcattctcaaacctctaatcaaccacatgataattgcacattcttttttctttgtccttttaattcttagcattttttctgtcagaagattaaaaatgctcaatcgtaagagataatggctctacataatataaaataatatagataaacaatgtttttatcagtagataactaaaacaaataatttacagacaaatatgatgtggattatccacttctttttgtttagataaaagggattatccatatcattattcaatttgtataaatatgttattcaatttgtataaaatcattaaagtttatatcgatggtaagaaacaaatagtttggtcgcacgcttactggatctgacgacttatttgggccgggtcataatgttattctattgtgtaacattaaggcctgagttaaaagtctttaaagtcggttcatttactccaattgaaagtaatggaccttctaaaataaaatctataccaagcccattattaatatagcaaatttacaaccaaatttgctattaaaaaaaggtagtcaagattactaatagggttacagggtgtacttagtacttacactatatacatgttgaacaatgatattaaattattttcttagaggtcttacaagtcttaaatttttgatgttttgataaaatcttcttccaacggattataatcaaaaaagtaatacactatcatattgtatgtccgtgtgggaacaacaatttctgcatcattagattctccattatctcatttttaaaaaatctaatcaatctttaaattgtgctcttatagtatttttgcaatagttcctgagtacatcagataacttttttttttctttacaagtcaactctcaattatggttacgaatattattaattctaattgttgttcttatgactaatagtagtatttatcagatattagaagaaatagctggtaacttatttcaactcattagtggtcccaatccagttcactaatgttgttttgatatgattaacctttgattaagaagatcactgaataaatttagatactctagatatcatataatataattatatttatatacaaataaaaagcatgtatcattacatgaaagaaaaggtatgtatacccccacacgtttgcttttgaccaaaatataggtggggaaacgaaatactaatagcaatgcatgtctctgattattaccgcatgttcgatatttgacgacatcataaaaattcattttccgatggtaaaaactgagagaggattaccatcacgtatttgtttttctgttaagaacccaatccaaagaatcagagtggaaaagttaatcgaacaatagcaaaatcttagagaaacttttttttttttttactatagtttaattttgttcaagtattcataaactattaataactgtaaaaatttggatgaaaccggaaccatgtataaaaaccggaacggactacattgtggagcggctaaaatgttgcagatgtgtgttgttgataaatgctagacgtgaaaaaactttaatgatttttctatctatcgatttaaggtgatttcaaacactaatataatgtttataatcaattagtacatacattaaaagttgagcattaattttcgaacaacaattagaggagactaatgatgtcgacccctcaaaatcttatccagatcttattttcatcattaacaattatctgattttagttaattacattagtttttttccgctgaacataattatctttaatattactcaaaacaaatactccagtatatatggttacataacattattggcattgctatcgttgataattttacgatctctagaatcgtaaatgacagtttactttaatcgattatgacactgttttgttgtcatcacaacgattttatatatatattctattacatttatgcacacaaaaaatgaccgtagactatcgaaggcttttgttataccagatgcacctaatcacaagcgtaaacaaagcgtttttttcccaaaaaaaagcatatttaattgtttgtgtgtataagaacaaaacaagtaaacaacatctagtttgactttacgatcatttttacgttgcttgtaattcgtccataaactagacaactagatattttttgttcccaaacagcggagactattgtacatgatatgcgactgattataaatgcatgaaacacgatcaagtaccataccaaaaatttacaagacaatagtgtacatatatgaatattatgaaccccatgtttaacatggaaacgggtaaaaagaaccggtgatagtgtatttataattttatatgatgtgatgattcaccaaaattcaaagttaatgcaagacttttttttttttttttaatccgtgtagttctcatatgggtcctcaataatgtacatctgactagtgttccaaaatagattcgacttcgcgtcaaataagactgacgaatgctgaattcgaaagagcattgcattatataagttttaacttgctcaatccttcacctcacagactatcaatatatagttatatacacacatgcatataatattttcgaactaggaaaaatatcataaactagagcaaaaaaaaatgaaatctggtttacatgtttgcttctgaagatcgaagaggcgccacgtactaatcccactaaagcactgtcaaaaggatcaaataaataaagaggaaaactaaaagctttaatttgttataaaaaaaattgttgcaaaaatgagacgaaatccattaccagctaggaccggacattttactgaatcatcgctccacattgataaatggcttttttattcatatgattgcattaacgagtcaaactttatggctttaaactcattgctgattcatctttgaaaaataagaaattctccaaaagacgcacctttaggcatttgctttcacatttttgtctgtttcaaatgttgaatgtacatttaattaggttcaaatttagttagaatctgtatttaaatgtggtaattaaaaaataaaaatggatatatattctaaagttagatttactatcgttctcttaagaattttatttcgagttcataatttggatatattataaatactacgtaaactatttctatacatgtcatcaaactaactatatatcgaaactagtaagtacatgttttatataaaatttaaaaccattcaaaacgtaaatatagtggtggatcatacaatgattttttttttttggttaaaaaaatggatcatacaatgttacggtagatttattgaaccaaaattattaataagatacactctaaaatgatttttgggattaatcatacaaactcagataatattgaacaaaggctttattacaaatatatagtatatatatatatatatatatatatatatatatttagcctgtatatattaaaaggaagaaagaattatagaatctcacggtaccaatctccccaaaccgatactttatagagccgtcaaaactaagacacgtgtgaatattagcctcacgtgtcacgtagtcaacggtaagtagcttaaaataaaacagctagtactaaataaacaaaacagcacagctaatacatgtgcggtcctcatgcaacattaattaattgatatttaaaaattaaagcctgattagtgactgtgaggaacactggagcgtgggacacacgtgtgacagaccttgcgtgtgggtttaatttttctttttctgtttttaattcatctcacttttttaaaaaaaaacatttatctcttactctcaaaatgcttctatttatagaatcatatgatatgtactttttccttatcaaaaagtctatatatggtggcataaaaagaaaagtgtctataaatgttttccgtttatatatttatttacatttgtgtcagtatccgcatgtgtgcaaatatgattcaacttgaagtcttgaagatcaaatctagatcggtaataaacaagattaaataggtttttttggttacattaacatggtaccaaactcgaatcatattcctaccaaaataaaaaactcgaatcatatttctttagaaaattcagaactaacgggtcggtcaaaactgttgtgcgattaaatagttaggttatgaattaagattttgataagcttccaacgtaaatgaattctacggctggcttaccacaaacccgagtaataagtttttagtttttattttataaaaccaattagtttaaagcgcaaatatagaaattacaaaccttagtaaaaatatttgtagttcctaatttcgaattagtataaaaacaaaatgattttctggcttggcttgggttggattcgtgtggacaatgagctgtgtgtacaataggaagtagctggctagttacgtgtattaacaattcttgagattttcttctttcactttttactttacgtaacccccatgcatcacgtgatttatgactcgatttgttcctctttcttttcaatatggtcaatcacttttttcatgtcattatgctatatactgtgatcatgaatcattacccatgaatatacttcacttttgcaaataaaaatacagactaatttgttgtgttaagtttttatgtggttgtgttttctatgatgtgattcaccaatattcgaatttactgtataaaaatttaagtgtttccaattcatcaatgtcaatttataacaagtgaattggttgataatatctcttatatataattataattttaggtttaatctcaccattgctataagaaaattaacgcatttcattatgattataattccgtctaactgttaatctcgataaaatcacattataaaaataattttaaatcacttcaaattagtaggagatatggatccattgattttaggtagcactaatcgagtcactttccaatcggatcgacttttgtttaggttgggctgaaatatagtacaaataatttatttttactcaactattttataataaataaatttaatccatgtttcttatttcattttcgacatagattcctaacttaattgttgacataaaaaaatacatactaaaatgaattatagatgtgtgcatccgttaaatataagattctattaaaaatcgtatctaattagctactacaaaccaatatgaatctgcaaatttctgtgtcgttcgataatgttcatttttgttgtaactcatagaaaccaacttagcaaaaacaaatagcagtactttacaaaaagtcaatattattgagtatttttccataaaatatatctctttattcattggatgaaactactactattctacaactacttacacaagatgattttgaactttcgtataggttaacttaacagccaataaatacgcattagattatcgttttaattgttcgaatcagcgttcaccgggtgtatatacatgtaatatgtagtcatgtttatacagctaaataatagattatcatttttatatgaggttgcttttatggataaatggatcgtatatacacgtattcttgatttaaatacatacgtcgatgcttatatccgtataattgtatatatagaaatgtaacttttgcgaccaaccaaacacatgtcgttagatgctggtacttttcaaaagtacagttctttaactgatctgtcaagttacaactgaaaaatatattattaatagtaattaattcgttattaattaaacaacttcgaatatttaacgttctcttatgattattcattcgttaaaccaaatattatatctttatttattattataattgtaaaatcttttgtaccttttttaaatctgtctttcttttccagatttggaaaagttttgttagaaatggttgagaccaaaactggtgttaagtcgagtcattttccaataactttctagtaatttatattcatcacaccgaccaaactaattattaaattcatttgctaataatttattataatattataatcaattcatataattcttacactctcgtgcatgtattggttggatttgtgaagatatatatacagctcataaactattatataatttgcatcgaaagcggaaagtttctacatagtgaacatataatttcgagacattttagtgagtttgaatttgtaatattatgagaaaataacaattaattatgggaaaaacatagtatacaagtacacaacgcatggagatcttgttgcaattttttttttttcatccattgttgcatcttgtcgatcgcagtacaattcaagataaatttgtacatctttatcacgctagctagtattcacatggtagttgcagattttgagttagcatgggttatatataaaggatccaaaagcacaatgaaaactcatatgaacttaattaagcttatcattccaatcgaagcccatccattatatacacacatatggtgcatataaaattatatactaaagcttaatttatgtactcctataaaccatatttaaaatcttgtgaacagtgatgttccatctgcaccatgttttgtaaagtggggaataagataggtatatggttttgagatgtgttatattttaagttatctacgaaagactataagtgtctaaaaatggaataatgggcacatgcataagttgtggcgatcgaaaaggatccactacatacttactttatcatttaattcgatctatatatatatgcattcacaaatcatacattattgttatacaaagctgattgttgcaaaatttaacctgtaaagggatcaaaatatcgtatctctgtgtgtatatccacaaaaatacatacgtggtggtgaggcaaacagagggttttatgccagtgaagttgtcaaccactttgtaattatttttcgggggtcaaattatttttgtaatttgttgaacagagattctactgttcttttgttttgtttctacttatattttcttccaactcctatctttgaattattatttaattttgtttttaaaattaaaataatagaatttttttttttttgatttttttgtctatccgcaatcatacaattattttatatttttttgcgccatacacgggtctcaaacttatctaaatatttatttatacaaatatatatagtcattatatactacaaattattattgtggacttatatcaaaacagaaaaatatgtgattaaaatataaaataatttgtatttgaagaccgaatactaaagtttatagtcaattttatactttaaaacaagattctttttgggtcaaaattttgtttgtaaattgttttgttatatgcgaattatttttggttaatgtctcaaaatgcaacaatatgtgaaacctacatgtaatgtagatatatagataacagagttatatgtagaagaatatgtaaatagatttagatattaatggcatgtttatttattaaattacgtaattaccgtaactcaatattaaaatttgttatgtaaattctatgtgtatataaataaaaatacttgattaattttccacttgtggatcttaaaaactttttaatccgtagttgtgtgtagagagttttcaacttgtctctataactagtacctttccctttctactatcaatgaaaaagccaaccaccgaagacattatttttatgtattgcattgcctagtactatttattggtcatcaagcaaatgtctttataaatcaccattgcctaaaaagtatttaaaagaggtgataatatacatagtgctctttatatgattgaaaaagttaacaattgggagtctcacatatacatatcaatcagaaacaaatgaaccatagtattagggatggtgattttgaaagctggtaattgtagtacttttgttaatcttagggtaaatcattgtggtttgtcaaatcattatatagggtgtattttatacgtaacatctcaattccaaaatatcacacaaacgagtcattgaaaatatatataattgttcatatttcgttttaactataaagctcacattggcaaagttactttctctcatagatgctgaaaatttaaaacttgaaaaattttcatcctttgcttaaaccaacaaagataaaagctaggaatccacaatgtcagatcatagcagattaaaactaaaatctaaattttatttactcccatcgttaatacgatgtttattgtaacgtccaaaagacgaaacaaagttacttaaataataatattccaaaaaacattgtgattacgtagatcacgtgatctccatctttgtaatctctcaacagaatataatgtttacctgtattctctgtatctttagactaatgaaactcctcccattgtcatgtctctttcaaaccaattgatacaatctatctatttcaaattttcaacccaattacatatggcacagtgccgttgaaaattttatggaaacaaatcatatatatatatatatatatatatatatatacttccctcttttttgaaatattttaaaccgaaatgattaaatattagaattcttagttaccacacaaaaactgcagcgataaataatagcacacacggaaagaaaagaggtccctatatatggtttttaacttagctagtcatagtggagaaagtaagctttcaaagtcaaatgaaaatatcgaaatcgcaccagaaaaaaacgaaaaggaaaccaaatgaatagtaacacaacatatttaattataaatgacatcatacaaagaagaagaaaaagaaagcgtaatgatgtaaatacatgaattgaaagatacttaaacccaaatacatcgacatttatgaaccaatgctccgtggaggacccgcaagagaaagagattgtggtggttcgtcgtatagaaattaaagttcacaaccgtaggatctcgtacaaaaatacaagatcgtacggctaagaacatgtgatgtatccaaagtaggaccaaaagagaatcgaaacggcgccgtacagagggactaaaacggagagaggacggtcctccgtaatagaaacatacagagagaaaaaaagtttaagtctctctgagtttgtgtggtcccgacagagagagagctgacacaattagtcacttgtcagttcagaatcgtcagttgtcagaattgaccctaatttatgcaaaaagctccatttatcgctaaaccaccagtttaaaatctttttcccctatctttgatactttttttttggctccctttctaattaatagcgatatattttacgtaagggtacggtaaaaaactgtgagttactgcatgcatagatttttctatgtaacatatgaccagctaaaaactcatacaaataaaatatgacctttgacagaatttatatattttgtggtgacacaaacactcttgttttacgtaccctcttatttattttttcttctgtaaaaggggtaattgattaacaaatgtgacagtcgtattaaaaacaaaacatatctagatgtttctctgtattatttcaggagtttcagagaagagatgcaaacggacaataatcatcaatgaaaatgatttcagttttgctagcgatactataaacagtaattcatccatttttctagagaaaatgtataagatcaatacattttcttttactttatgtgttaactaatgtgtttcgatatttattactaatagtctcttttaaaatcatcaataagtcacttagcctaaaagttgaaaacaatgaataaaacttctattgacataactattttagttgcgtctgcttatatgtatatatcgacaagaagtatataggacctcaatccatatactcttttgattctctagtaggcgaatagcggttaatacattcctatgtaaatcatatttctttaatggagactcgaacttatgaatattcaacattccacaaagaaatttgtgctaaccaagcgagctaacagtgttggtatagtcatagatatatatatatatatatatataattctttttagcaaaacattttctttgtttgggataaaaggaaaataattttctaaaatttatttatttatttatgattacaccatcacccatagctcgctcatatgttcgagtcgcaattcgtaaaaaaaattgtttatacatagatatatggacttttggtctatagaaaaaacaaaccagcaaaagaaaacaaattttttattaacatatatataaagtagaaaataataagatctaaacgacaaatcaaaatgaaaataaaaaataaacagtagacggaaatccgaaaacactgctgttgaagatatgaatgtttgatttatgagaagtcggtccatagatttaagcacaatagtctaagaagccagccagtcttatctcatgacacatataaaagaaattatggatatacaaatcatttggaaagaaaaatctagacaaattttgaaaggataaatgtaaaagaaaattgcatgagagagagggcacatgtctccttttagccttctgttcttgggagggaagccaaaatagtttcacttctgtattttctcagccactgctcttatttgggacctgtcttcaaagaagtaaatcataaatagatctatattttgtgtcaatttctgtatttcattctcatttaatttatttttgtatatattatatattgtgttttttaaagaagaaaaataatagattttagattccagctgtgaatttaaccctttctcgatcgaaagtctattttggcgtttgttccgtgaccatcctctcgctacgtcaccgttttcatatccatgcaaaatattttgaagataatatttctctatccccccacttttcattgattatctaccctttatatatacacatttctatgttttttggatcgaaacaattttattttaaatgaataaagtataaatgaatatccagttaaatcatcgggtccattccacggacaaaaaattgtattattactttcacatcatacccgattaaaacaagtttctatcaatttttagaattttgcttattattattggtgttgctgttgttattgttgcagttgctgctgctgcgatattaattgatattgattattgtctgcatcataatgattatgaaaaatggggaaacaatatacacaaccagttgtactatgtcacactttcaacattaattcttgatcaagaaattggtggaatgttatcttctttcatataaataaattgtcccctaccaaaaagtatatacgataatgcatggccaataatgatgcattacgtataggcccctcgttgaaagttaccaaacttctcattcaaaatattttatatttgttgagatttttcttaaatatatgtgttttagtcggatgtaatcctagattttatagccgttttggtactattgcattgtcaagtttaactgctgcgtgatcgtaccttttcgaaaccacaccaatacactatatatttctaattctatcaatgtgattactaattatatggtttaattataatacaagtgacatattatctttaaaacgatttgtatttaatgtaaaattaatttatcttaaacgcacaacatttattagagggaaaactatatgtgaagatatatgaattattttcgaaatgattattggaacgtttcaaaatgaaagaatggagaatattttaaaaatcagaggcttagtagggcgaggccccctctatgccgtgaacgctcacaggagccttacttattttatctctttgtttcaaatcttatcgacggaaaatttctataacccatttaacaaaaaaaaaaaaaattataacccacaaatgattgtataaatagtttacaaaacgataggtatatatgtagatatatatagtactgtctatgcttatatacttttacaacccggtttaatatttatataattaccatttatctcttcataaattatcatattaatttatgtaatagcaacccccaactgtatttataaaaaaaaataacattatgcaatcgtcaacattactacaaatctatatattatttataattaattcatctataagaaacttgctatatgttttcatttaatattggttggaaggttatttagtcaaagaaaagccattaatagctggagatttaaactccattgtgaattacaaacatttcttaatatgcaaaccattacgaagatgtatccgggacttaagttgctgtttaagtctaatttgttcaccggatggagacaaaacatgaaataacggctaaattaattgtaaaccatagttttcaagctttgattaaagagtcaagcgaaacattaattttagtgttgggtctttaattataaatcaccgatttgcattcaagttttgataagatatctagttcgactcttcgttcggttttggtttagtaagtaaacaatggtagcgacgctaagcatggtttgattcataacttcatgtggtaggttatggccttggactttactttggtcgaaaaaatatatcattttaatattttcgcaaaataataatatatgtttgatttattctaaaattcaatataatttaccaaatactatatttaactatataactatttcaaaaatagtgtatttaacagagataaaattctatttgtataagaaattcagcacaaaatagtttaaaacaaaaagaattttacaaggacattttcgtgaattttaaacaaacacattaaaaataagaagaagacaaattaaaaagaaattcaaagttaagtaaatgcaaacacattttttgtgccaaatggtcgtttaaaaaggattcgagagttcacgtgcaatgaacttgtactatatatgctaatcaaaatctacttactttaaattatttagacgttacattgaactgtctttagataaaagatgtactgtaatattggccttgtctatcttaattcataattttattttagtatacctagattatttttgcttatcctttactgattttacaaagtattcaagaccataaacactagtatagtagtattgaactaaacttaactagcttggatttgaccaagatctatgcaatatattaagaacttgttatacatatatgtgggttaataagccatatatacctacactcacaaatcttgaatatagattgtgatacaacagcaatattagtacaaaccattggatgctctacaatgttttgtctaattgaccaaaaataaaatttaacctcatatctttcaaccacttttttcataagattaaaaagttttgtcatatattcttaatttttttcccttgacctagctagtaggttttctaaaatttcggatttgatacgtatattcttatagtttgctaatacgtatcggatacagcatctttgtgtatggtccaccagtaaattacatttgggtaagtatttgattttagttgatttttttccaacttatgtcacaaatcattcatgtatcaaaaaagttgatacattgtcaatttactattaatgtatttatccatataaagtgacttctaaaagtattttaaatatacaaaaaaaaagtagcttagattctttttcatgaaaaaatttcgaaaaattaaaaatgaagaaaaaaaaaatcctgccaactcctttattaagatggtaagagagagctctgagaagagagaagcagcaccaaaaaaaattcatatctctctttcctttcaattttctcagttgttaaaacctctcatactcattagagagctcttcacgagagaactctttctctttcccattaaagatcaaatctttcttcttcttcatcaacaccatcatcatcatcaccgtcatgtgtaacccatcaacaacaacaacaaccaccggttcagagaaccaagaatctcgaaccggactcttcctcgatctcttctcgatcaatagctttgaacccacaaagagaaatctccggcattgtgagaacagaggatctcctcttatggcagaagctgtaacagaggcgaaatctctcttcacgttagcttttccgatcgccgtgacggctcttgtcctctacctacgctcagccgtatcaatgtttttcttgggtcaacttggtgacctcgaattagccgccggttcactcgccattgcctttgctaacataaccggttactctgttttatccggtttagctcttggtatggaaccactctgttctcaagccttcggtgctcaccgcttcaaactcctttccctaaccctccatcgaaccgtggtttttctcttggtttgttgcgtaccgatctcggttctctggtttaacgtcggcaaaatatcggtttaccttcaccaagaccccgacatcgcgaaattagctcagacatatctcatcttctccctacctgatcttctcaccaacactcttcttcatccaatcagaatctaccttcgtgctcaaggcatcattcaccccgtaaccctagcttctctctccggcgctgtttttcacctcccggctaatcttttcttagtctcttacctccgtcttggtttaaccggcgtagcagtcgcttcctccatcacaaacatcttcgtcgttgctttcctcgtttgctacgtctgggcgagtggtcttcacgcgcctacatggactgacccgacccgtgattgtttccgcgggtgggctccgttgctgcgtctcgcgggaccaagctgtgtctccgtgtgtttggaatggtggtggtacgagatcatgatcgttttgtgtggtttgctcgtgaatccaagatcgacggtggctgctatgggcgttttgatccagacgacgtcgtttctttatgttttcccgtcttctcttagctttgctgtctcaactagagtcggaaacgaacttggagccaaccgtcccaagacagcaaagctaacggctacggtggctatcgttttcgcggcggttacagggattatagcggcggcgtttgcttactcagtcagaaacgcttggggaaggattttcaccggagacaaagagatactccagctaacagcggcggcgttaccgatattaggtctatgcgagatcggaaactgtcctcagacggtgggatgcggcgtcgtgagaggaacagcacgaccgtcaacggcggcgaacgtgaaccttggagcgttttatctggtgggcatgccggtggcagtgggtctcgggttttgggccggaattgggtttaatgggctttgggtaggactacttgcggcgcagattagctgcgcaggtcttatgatgtacgtggtggggaccacagattgggaatcggaggctaagaaggcgcagacgctaacgtgcgctgagactgtagagaatgatattattaaggcggtggtggcgagtactatagacggtgagtgcgatgaggctgagccgttgattcgcatcacggtgctttattaatattaattaagacaaaacaaaacaaaattataatcatcataattattcccatctcttttccatagaaggagaaagttttgcctttctttgagaaatttaacattttcttctttttttgtacttaaaaatttctttttttttatctccttattttttccgatgcccttatgattggccgtttatatggagtatctatgagttttttttttataaactactacatatgctaaatacttgaataaactcacatgaatgcaaaaaaataatcacatgattttttttttgctcacaactaaacatttaattacacccaatctgagacaaaagatgttgggaccatatagctggagcgacagagaattaattcaaaataatttttgaaatgtttttgtaagttaataagataatatggagagaagaattcactgttgaattgtagagacttattattatttgaaggaaaaaatcttactaataaatagaaaaaaatgggtgataaaaaaaggaaagagagtaatatggtaatttggaaaaaagtggcaaccctgtgggaaacaaaaacttgtgtctcaaagattcagacaggtctgaatgaatgttttggattccctatagactatagagtgctgttttgttcagagatgagagagagagtgagtgagagatatcaagtcccaaggaccattgtattgcatcatctcataaattattcctacattttatttttattctcatcataaattattttatccatataattctgcatttcgatgggtatggtttctagtttattattcttattatataaaaaataaagttttaaagttgacgataaaatatgttatgtaaacttcactatagatattttttttccatttcattctatcatagtgaaatttgagaatgtacattgtataagatcatacacttttttttttgtcgacaaaaatcatacactgaaaaacaatgaaagttgttacaaatataaacaaacaataaatcaaatataacactttctcctgttgtttagaaccttttcatatgcatatcagcatatgcattaacaaattattgtgatgtattatgatttcatactgaaaattaacgaattcgttgtaaaataaaataaaaattaattcattgtaaaataaaataaaaattaatcaagagataccttatgaatttgatgtgttgttaatttccaattattaaatataatatattccccttctttttctttagatatctttattagtggtgccaggagagatttaatacaatgatttaatgctatagttcataaattttgtcagtgcaataattaatttattagtaccacatcctcattttttgggcataatttggcaccacatttataagttagataaaaatagaatgcccagctgcgatccataatacccactgtacatcataatgtttatatatgtttctgaataccatagtttacattggtaatgcacaaagggatttatattattacattgagttataaatattatttgatattcactaatattcaataaaaatggtggtactgcctcctctcagaataacttcgtactactaaaatcttatatgacaaattgggtaccaattattgaagtactgaacttatcctctgaagcataattacaaaaaaaaaatgaggaaatgaggacaaattttgaaaacagtggaagaatctttttaatttttcattcaatttcaacaaagtgcaaacaaatttttcaggaactatttaatattttcgtaccaaccaactgagaatcaatctttaattccataccaagaacatacacaaaattattgtagtattaaaagatcacagtttgcaaagtgaaacgttgattttttttttttttaaaacctacaaattttactatcaatccgataggataaaaaaaaaaaaaattccactgtggtctttatttggccacatctccatatacagatttgtgacagaagcatctccgaaattttcatgaaccatcattatttcgggtgatatatagtactataacattaataagccttcaattcttattcaaaccttaatatagctagctaggtgttatatatagaaactatagacctatttctcaggttttctcattctatgaatcacctagaatgaaaaagattccgttttgatgaaaaaagaatctaagatgtgaaaaagtgtaataaatggtgaaaaatatatagatcaagaaagaagaaaagggttggagccaaaagaaagaagaagttaatttcactgcccccaaaatagataacatatgtgtgggggagagaggaagagagagagaagacaaaagtagttgagagagagagagagagagaaagtgaagaagaagcagaacagtggcagatgtcccacaaattaagacagagcacaagttatataattggagtggactgctcacattccacacgagggggcctccctttatttagttacccttctcttcttcttactcactatttattaaattgacctctaaattttatgtaactgagaagcaaggatattgcaatggactacttagttcatctatatctttttctgttagccaaaacttacttaaagcacttacaagctacttgatgaactaatccgatatatatagttcagtttttatagattttgcggccaacaacaatgcactgatgaaagaagtaaggatattgcaatggacttcgacacgatacttgaccaatcaactagctaaagacctaagaaagtacattcaaagtttcagagtcaacaatataagtgtattaaatgcttggtctatatatgtgttgctttatatcaacttattgttagtaatgttagatgaaatgtaatgagatatcaaatgcaaaattttaaactcaatcataagttttcacgttatttgtaaaagtttacttatcatattagttatgaaacaaaaattaaatcctaattaaaataatagttttttatagattatatacttaactatggttttgttggtataccaaagaaaagttattgaaaagatatgattacgcagattaaaaaaatagcactatattcttgtgagtgttctctaatttgaagaatctaatattctgtcgaaacattagttaatcatataattgtgtcaactcaatttaatcatgtacaaatttgacatttgagtgcttatagtacaattgtagtagtccacattctaactaaatcctgctaaaacctcagtgcactaatgataatgtaaactaatatgaaaactatttattaatttgattggggacaaatccatctaattaagaaccttggtggatgctgtgtttcacatatattataattggtgggagctgtgtatatatattgtatctatatgtctttcgacaaaaaaatgtatctataagtcaaagttattttatagcttatcttccttagcagatcagctctctatatgtataattatttataaatatctagccactcaaactatagaatatatatatccgagtgtatctatatgtgcatgaccattagcaaaagctatcttttcatgtcacatgggttccatttatggtaacaatccatcccaatttatagccaatagtggacaaacatgtgataacaagaccacaaacaaaaatacataatacaaaattaaataatcaataaaaatgaaaggacataaaccaaaccaccatgccatgagagaccaaaacacatgcacatacatgggagcctacacaagcatgttttggcgaatgccctaatttatttgtccaccttgtaaccaacactttcacaatcttatacccatcgttgtcttataattcccaaaaataaataataaagatgagacattaacccattttaagaaaatatactccacaaaattatatattatctaacatttcacatttttaagagatttaagttacaattggtcatcgtactttcaggcaaaggttatcctagacaaaatcttgagactagttcaatcaagattcaaacatgttcttacgtgttatgtacctttagggtttttaaaaaataaaaaattgtaatagtaatgacatatatagcagtgatgtagattaaacatggcctaatttccatgtatacgtcatacgtatatatattgtccatcccatgaacgtaaaacttaaatatttatcaaattaacttagaatagttaagtgaagatagttaaatgtttatcatattataaattcgaactcagtactatacgtttagcgcaatattcatatagcaaaatctggaacttgtatctaccacacaacttctgcagtgatgataaaaaaatatgaggtaccgacccaacatgttcttgttctgaatttataaattataattaacttactaaatattatatagatacgtacatattgcaagttgcatgtatatatgatattaatatataaagaatttttgtatattaagaagatgtcgtaagtatgatttatgaacacatgacttgcctgtgggacactcttttctccacatgtttcccttttcttgctctttttagggctttttcaccagaccttttgttctttctttctttctcaattcacatgtcttgattttgaaatatgtagacccaataacttgactctccttaattatttgaccaacacgattaaacctgtaagggtaaaataagcaaatcatcgattatgatatatggatatatgctgctgttttttttgtttcaatacgtctagagtcagattggatttagatctttatcattgaccattgtagggatctcacatgaaaatgagaaagaaagaagaacaaaaaactagaaaacctacaataatgtgggtgatcgactcattgaccattgacttttagtccaaagtcgataaaccttatataagagtccagtaattattcaaataatgtggtctaaatctgtgctgttgttgattctaaagtgggtttcagtttgagatgaaaacgccacaatctcgaagaaacactaacgatcttgaagaccaattcatgcattgccaattggttttcattttgagactcatataacttaaacacgaacaaattcacatagaattttgaacgaagaactgaagataaatacagatgatttctcaagttcatcaaccaaactgttagatgtacatctccgtggatgaaaccgttaaaattcactacattggattagaaacccaatcacttatctgatattttttgtcggataattccatttctgattatccggaaaccaagccgtttcaaggaccgtaaaagtatatatatattggttaattaagtctatgttcgtttctagttagggttagccttttctgatgtctgaaggatacccaaggccatcgtcccatggtttttaaatggataaacatggcctaataatagtcgccatgtaaaataaaatcaaaagaatgaatcggcccatttcaaggactcacttacctaggcaaggagaattttaactttactattcatgtaagttgtaaatgggcctagtgtaatgaataaaaagtccattatggattctaaccaacttttagacgacagatagaagaccaaaccattgctcaccaaacgttgacaaaaatttatcactaaaatactgctaaatcatgattataataactttgtaagtaaatcaaattgaaagtcttccactaaaaaaaaaaaaactttctaaatctattataaagatcaaagtcagtaaaaaccggaatggacgttatctggcatagtcttggacccaagcccacgccaattctcttagattttttttttttttgggacaaaatacattcaagtcaaaaccagcaaaatggatttggatcgatccagtaaattaccaaaagaaccaccttgctgatcccaaaagcatatagagttcacgtgcaaaaacaaggtacccaataattgaaaatcttgaggtaataaaatcgtgtagaagaaaaaacgacgaacaagtgtacggcgaattgaagaagaaggaccgcaagggaaaacaaatggccgaagactttttagttccataaacatataagagatacgtgacctcactctagattctcttcttcatctaccttttttaacttctctagctcgttaaaacttttcaaatagctttttcaatttccaccatttataatgtatctcgttacattattacttttacatcaccgtatattttagaataaacctttatctttttagttgaagcattttacttcattcataaattaagtaattttcaaattcgaaacgaaatccaaaatttacaactatagtgttaaatttgtcttccttaataaacacaagttcatgaaattcaacttttggaaaatggtgatgataaatttggctttgggtttcaatttttttttacataagtttcactttcacatatctttaaactagacgtttgaatattaaacatcaatctccactgagtgatgaatagaagtaaacaggcgtataagaagaatatgataaaattgataagaaaaatattccttttgctataatcttcaaagaaaaataaaataggttggctggtctcaactctccagaaatttcgttttcaactttacagatttacatagttttgggtagagaaaatgacaaagcctgtgaactaaaaattgacatgttagtgctccagtgaagtggaatctctgcctgcaatatctcttttatctaaaacagaattacttttttttttaatctttatttctcaaaagagttcatagtttcagatgaaaatatggggttgcgatattttggagttttggactatatagtttgaatttttggactatgctaattggtaaatatgttcatgaatagcaaacgtttttttcttctaacgattatttatcatacaacaattttttacgcaacattttgagttattctttgacaaaaaaaaacacattttgagttatattaaactatatatagaatataattttatatcatcattatttgcttataatataaggcggccaagagcgttacgttctcctttccactgtattttactgccaatttttcccttttaccagaactttataaaaagttaattaagttgggtttccaaggcatatacatatcgcatcataatatgtagaaacaatagacaacacatcataatgtataagaaaatatattacaagaaaatttcgaagcaaaaaatacagtgttaagttaacactgttaagcagttgtttaattcaagactttgtaactttttctattcaataatgacgttaagagaaaaagaatttattttcagttcctcttctcttactagtttctttttatagaaaccaaaataaagttactgatctaatttttaaaaagggacaattgcatgggaatgtcaatatgattacgcaaacaacttctgcagataaaaatggtttgcagaaaatggaaagcacctatccatcatagctatcttggaagtctcgttatttcaaaaatatttctctcctttttattttcagctacttattaattccataatatttttatattaatatatttcaaaaaaatccagattttatttctatttttagaactataaatcaagaaattatctatgtaatgttaaattcctatttttttttagttattatagaaactgaaaatggtctaattcatacgaagtcgatttttctcacggcatattatgtaaaccatgaatgtattttattagtgattcgtaaaccctaagtttcatatacaataaaaacaaaaatggaacctaaattacgaataacctttatcactatacgataaagtataaaacactaataaatggaccctattacgaccaatcgtaccaatatttggtcgtatctttcatttttatttatttacagatttgtaaattttaaaatagacacttttgtgttggtcaataaaaaaatagactaaaataaaaaatgtatttacaagtgaaaccaaactaaaaccattatgagaaagaatctcacaaaattgaccagagtaaagagagagacaaaaatgggtcgagcaacgaggtggttcaagggtttgttcggaatcaaaccttcctcttgttccggcaccgactccggcactatttctaaccgccttgaccgctctttatgcgacagctacgagactataccacctaacatctccgagaaagaagctgcgtggctaaggtccttctacgcagcgggagaggaggaaaaagagcgtagaacgcatgcaattgcggttgctgccgcgacagctgctgcagctgacgcagcggttgcggcggctaaagcggctgctgcggttgttaggctccaaggtcaaggcaagagtggtccgttaggaggtggcaaaagccgtgagcatcgtgctgctatgcagatccaatgtgcctttagaggctacttggtactaacacaatttttcaatttttctaatcatttcaatatttttaatctttatgtatttgagccgttacatttttgtaacgtaaaaggcgagaaaagcgttgagagcgttgagaggagtggtgaagattcaagctttagtgagaggttttttggtacggaatcaagcggcggcgactctccggagtatggaagcacttgttagagctcagaaaactgttaagattcaaagagctctccgtcgtaacggaaatgctgctccggcgagaaaatccacggtaacacttacttttccggtttggccgtaccgagtttatttatttatttttatattaagcatacttagcaatcaaatctgtttagagttccataatttgatatatcaaacatagagatcattttaaataattttctcgggtcaaaagaaaataatcttaaaatgtaaaaagattgaaactgtttaacctttatgtaaaaagttgaaatcttcttaaactagtttgtaagcagataaacacttttttaactaggctgtaaaagtgttgatgtaactttttacaggaaagattctccggatctttggagaatcgaaacaacggcgaagagacagctaagatagtggaggtagatacagggacccgacccgggacttacagaatccgagcacccgttttatccgggtcggatttcttagacaacccgtttcgacgtacgctttcttcaccgctctcgggtcgagtcccaccgcgtctatcaatgcctaaacctgaatgggaagagtgcagtagcaagttcccgacggcgcagagcacacctcgtttttctggtgggtctccggcgaggagcgtgtgctgctctggtggcggagtagaggcggaggtggatacagaggctgatgctaaccggttctgtttcttgtcgggggaatttaactcgggttacatggcggatacaacgtcgtttagggcgaaactgaggtcgcatagtgcaccgagacagagaccagagagtaatgcttcagctggcggatggaggaggagtatcggcggcggtggtgttaggatgcagagacagtcgtgttcgggtgtcagagaagctgtggtcgggaatatcgagaggcgtaggatgcgttggtgattcttatttccataattattatccgtttagttttggttaattaggggagtaatgttattaatttaatatagtttgatattattatagttttctaagtttcactgacaaaatttaaaattgttgtttcttgtatgctacatattctatttctatgtaagttttttgctacggataatttacatttttattagcttaactaaaattatccgagtttttttatattcggtgttgagaaaacggtactgatcggttagtaaacaattattggttcggttaaatataccaaaccaatattatcggctacaacgcatgcaagagactattttgtaaacaaccacttaaacataaacacgtgttaacgcgattcacatcaacgcgtgtggaaaaaggaaagttgcttccttcgttcttaatcccttctctgtgaacacaaaaacgcgaaataacaaacaaaaaccaatacaagtgatttccattatttctcgtctacgtatacaattgatcttcccccatctccaattcagatttggacagaggtattttttgatccgattcttacgaatcctgaatcttcctcgtagattaatcgatcgatcggttcttaattcgcggaaaattgtttcagtaacctgtgatcgtgtcggttggggtagaagagatcgaagtgggagcaaaatcatgatgaatcggctattcgggaaacccaagcaggaggctaatgctctccaaactttagacaagcttaacgaggtatcatctacttatctacttctctctctcaatttacgttcgatctgaaagaaatatcgatctctctgtgtactgatctctgtactgtttgtttaatcttaaacttaaatcaccataagacatcacttcaaatccgattctcgtttatatttaatactcaaaaacgattgaattggggatttctgagtacaatttatatgatcgtttgcttttaaaccatattcaaattttgttgatttgttcattgcagacgcttgagatgctagagaaaaaggagaaagtactcttgaagaaagctggtgcagaggttgagaaggcaaaagaatactcccgggctaagaacaaacgaggtatgacctcttatttattatgactcatgtgtgttgctaatcactggagtacttaaaagctgtattgggtttttgcagcggctatacagtgtttgaaaaggaagaggttatatgagggacaagtcgaacagcttgggaatttccagctccgtattcatgatcaagtgagtttgttttaagattgttaactataaactatatagcagtaattagatgaatttattgggatcttatatctttttgtcatacagatgattatgttagaaggtgcaaaagcaacaaccgaaactgttgatgcattgaggagtggagcttctgcaatgaaggcaatgcagaaagcaacgtaagtgttcatcacattttcaccatattactctttactaccattttaaccgtcatcagttctgggaatcgttaatacgagcttggtattcaaaatacttatgcttttcttgtgcttgaatgctttaacatttctagtgcctgactaactcaaaacacaatattttgcagaaatattgatgatgtggataagaccatggacgagatcaatgagcaaaccgagaacatgaaacagatccaagaagcattggcgactccaatgggggcagcggctgacttcgacgaggtaactttcttgtacccaaatgatcatatatttttcaactaataatgacttttgtctaagaaaaacttctctttgataggatgagcttgcagcagagcttgatgaactagaaagtgaagagcttgaatcgcaacttctacagccggcaacaacagctcctccattgccttcagttccagtgcctgcagggcgtcaaccggctcgtcctgttccccagaagcggactgctgaggaagaagaactcgctgcattacaggctgagatggccctctaaggtctcttctatctataatcaaagcaaaatcaatcaatttgcttacagactatggatttgtaatttaactagttttgcaattggcttggtttaactgcaggttattcacctctccgagcagagacatgtatgcattgatagacacgaacagacgatgtatataaggatctgaatcagattaattcggagcgaaaaacttttataatccccgtcgttaatgttatctgcaatttgagtgttcttcacataatttatcttttgtaatttttgtatctttttatgacactttttcctttggttaataatcactttactcctatgttcatcactttcgcctgataagactactcatgaatagtcaaccatatacgttgacttcgctgctttaacaaacatcatgccgttttggtaccataaaattggactccgtgtcgttttaaggttaaattcaaattaattggaataaaaaatgaaacagaaagcgagggataataacccgcttaagttttcaaggcttcttctacaattctctcatttcgaatttgataaagagaggagacgatagtgagggaagagagtgagagagagctgtagcagtgtttgaaatcctttggattgcatcaccaggagcaagagatcacgatggtaatatactctggacgaatgttctctacttgtgattttgtttcgctaatgaacctctgtgatttgtgcattttcctgggaagatcgagtgattattctctatgattctatgaatcgtgattatcttacactgatgatcttagcttgtgattcttcgacttacaagagaattttggatgtattgattcgacctatttgtttgaatgtttagtagtcatcgttatgtgtttctcttactcttcgaagaaatttgtttaaacttatcgttcatcggtagtaatgtttctatcttccgtagttcattacaaatttgtgtgaggaatttccgcaaacacttggactgcatgacgcgaatcgataggttctcgaattagcatttatctagcagccaattctcgcaatcagtgtagtcgctgagttgactgtatatatttttgacattttcgatctggaaactatttgttgacagatcatttgttggatttcgtcattgaagctctgaagttttttttcgtcattctcgtatcaactgaatcgctgctttctattgttgatgatattcagtctaagaaacggggactttcgctggaggagaaacgagagaagatgcttcagatattctatgagtctcaagacttcttcctagtgagcactttctttagtttttacaacttgctaatttttggacgcctttgaactagctttatctaccaagtgatctgatatctagagtcgtgaagtgcatatactgcctaaatttgttgctattgaacttttgggtttgtgatacaagcacttatgggtctctacttttgtaaaaaaatttcagctaaaggaacttgagaagatggggccgaagaagggtgtaattagtcagtctgtgaaagatgttatccagagtttagtcgatgatgatcttgttgcgaaagacaagattggaatttctgtgagtagcttagtgttcctatgttggatctttttatttcatttgttgccatatagtccttgtctctgttatatgttgtttgacggtgttcattattttgcaaatgaagatctacttttggagccttcccagctgtgctggcaatcaagtgagtcaccgttctgtatcctgagatgacatcaaaaagattcatattaatttgagcatagcgaaattcattgtttctgatctcattttgaatgaacagcttaggagtgttcgccagaaacttgaatctgatcttcagggtagtaacaaaaggttagcagaacttgttgatcagtgtgaggccctaaagaagggaagggaagaatcggtaagtattttcagtattgtagaattaatgctcgaataagcttacgtgtgcttttcaccagaattgctgttcttgctgcaggaggaacgaacagaggccttgacgcaactcaaagatattgaaaagaaacacaaagatctgaaggtcagattatacagactatctgtttgcatagagctattcacatgcttaacaagttgctaacagtttcttcttcttaaacagaacgagatggtacaatttgctgacaacgatccagctactttggaggcaaagagttaagttctgcataatacgttacttttgttttgtgttagatctcctatatggttttcccggtcttcgtggagcagaaataagaatcaatcttgtgctttactagctgtatcaatgtgtatattccttctaattttgacagggaatgcaattgaagttgctcaccagtcggctaacagatggacaggtatttcatttctaaaacttgggaatgtgttttcagttttaatacttacgtaattttcactgcagcctagattataattctttcaaacttactcagataacatcttcacactgcgacaatggtgttcaaacaacttcccccaggccaaggaacagctagaacatctatacacggaggtatcttccagatcttttcacttcaaaaggctataaattccacatttcacattctcatacatgaaggagagactaaatcagctgggtaactttcaggcgggaatcactgaggactttgattacatagagttatcatcattccctttgagctcatcccatgaagctgataccgcaaagcagctagtacaagatgaagcttagttctaatactctccagcataacagttaaagaaacaatagcttaagtaaaaaatcttttcactatccttttaagttttctggttttaaaggttgcaacagtctgtaattctctatgtgacccaatcatctaatgtcaaaactcggttacaaattctgtggtcagaaaagatttttattttctttgtatctgtcggctatgtccaagcttggctatgttttgttataatattttattggagttatatatatatcatgcgttagttgttgacccactggttacttcttgatagctgtattaccattttatattctttcttggccgcttttttcagtcgtgagcagcacttatgttatacacctccaggtcaattttgttgctaccagaagaggaaatgggcatagactttgtactttctagtcttttgtgtttttgtgttatcttaaacgcaggttgtctgtttttctgacgatgatgagctgagctttacaaaataagaagaacatgggagctcactctgtttttctcatccttttttccgtcattgccattgccattgtagtacatggccaaggccaagcaggttcgtgagtctcattctcgcttattttcctctgttagagtctgttttgatttgaaaatgagcaatcttcagaccaaagatttttgaagttttgatatatgtggttgcattttggccaaaaccgtgttctgattattggtttgacatgataagtgaggtccaagtctgtttctatgattgaatgctttaggttctaaaatttaaacctgcattggaattttgatgaaaattttctcaacgttgtagaattaatcaaaacccttaccttcttctggtccaggtttcatcagcatagattgtgggtcaccccctaatattaactatgtagacactgatactggtatcagttacacctgggatgcacctttcatcaacgctggagtaaatctgaacgtctctgaagaatacggttacccgaaaaacccggttttgcctttcccgcttgctgatgtaagatcttttcctcaaggaaacaggaactgttacaccttaaccccctccgatggaaaagggaatctttatctcatcagagcttcgtttatgtatggaaactacgatggtaaaaatgctttacctgagtttgatctctacgtaaacgtgaatttctggacctcggtgaaactcagaaatgcttctgagaacgtcatcaaggagatcctcagctttgcagagtcagatacaatatatgtttgccttgtgaacaaaggtaaaggaactccttttatttcagcgttggagcttcgaccaatgaacagctccatctatggaactgagtttggaagaaatgtctcattggtactctatcaaagatgggatacaggatatttgaatggaacaggacggtaccaaaaggatacatatgatcgtatttggtctccgtactctccagtgtcttggaatacaactatgactactgggtatatcgatatttttcagtctggttataggccaccagatgaagttattaagacagctgcttcgcctaaaagtgacgatgaaccattggaactgtcttggacatcaagcgatccagatactcggttttatgcgtacctttattttgcagaacttgaaaatctcaagaggaatgagagcagagaaatcaagatattctggaatgggtcgcctgtttcaggagcttttaacccctctcctgagtattcaatgacagtgtctaactcacgagctttcactggtaaagatcactggatttctgttcagaagaccgcagagtcaacgcgtccaccaatactcaatgctattgagattttttcagcacaatctctggatgaattttacaccagaattgacgatggtgtgttcatctctactttgttagtcgtctacgtatattttgttctggtctttaattttcactgacactcacagttttccattttctattggtaatgcagttcaagccatagaaagcataaaatcaacgtataaagtgaataagatttggactggtgatccttgctctcccagactcttcccttgggaaggtattggatgcagctacaacacttctagttatcaaatcaagtccctgtaagtcattcattcatttcaacctgaaaaaactcattgtgtaatttccctcaaacttaagttttgctgatgagcttgtttctgtattttgctgcgagaagaaatcttagttcaagtggattacatggaccaatagcgttcgcatttagaaatctctcccttcttgagtcattgtaagtatacaaacacattgaaacttgccaccactttattcacagtaactataatagtggtgtgcattgttttcccagggatttatcaaacaacaacctcaaaggaattgtgccggaatttttggctgatctaaaatatctgaagtccctgtgagttgagcacatagagaacctcgttgagtttgtattgatagacaatcaaaatagtattttgtctctgacattaatttgtgtcgcaggaatttgaaaggaaataacttgactgggtttatcccaagatctcttaggaaaagagcaacggctaatggacttgcactcaggtacacggaaccatagtcattttgccgcgtctctaccattttcaaaagcttattgatttcctctttgtctccagtgtcgatgaacaaaacatttgtcactcacgttcatgtcgggacgggaacagaatcatggtgccaatagttgtatccacattagtgattattctcattgccgccttggctatcatatgcatcatgcgaagggaaagcaaaataagtaagtacagagtgtcttttacttagatttaaatttaataaggtagaattaatgctgaaagaaaacgagtgtttaatttcctagtgtattcaggagcatattcaggaccacttctgccttcgggaaagagaaggttcacatatagtgaagtctctagtattacaaacaacttcaataaagtgattggtaaaggagggtttggtattgtgtaccttggttcccttgaagatggaactgaaattgctgtaaagatgatcaacgattcttcttttggaaaatctaaaggatcttcatcatcatcatcatcatcccaggtctccaaagaattccaagtcgaggtaacgtaacactagaatcattaatccgataaattagacaatgttgttttatggttgctgaagtgtaaaatgtatgcaggcggagcttcttttgacagtccatcaccggaacttagcttcgtttgttggatactgcgatgatggtcgcagtatggctctcatctacgagtacatggccaatggcaacttgcaagattatctttcaagtattcttcatctctctcgatctctctattgccaattttcgctgcctttgcgctcacggatgttttgtttacggatattcaggtgagaatgcagaggatcttagttgggaaaagagactccatatagccatagactctgcacaaggttggtcccagttttgacatcctgaaatgttcaaaagctaagagacatcaaacccggtttagtctggttgtaaatccccttattgatttgttttccttggcagggttggagtatcttcatcatggctgcaggccaccaatagtacacagagacgttaaaacagcaaacattcttttaaacgataacttggaagccaagatcgctgatttcgggctttctaaggtcttccctgaggatgatctcagccacgttgtgactgctgtcatgggcactcctggctatgtcgatcctgagtaagtttccttaacacatcaccacttttaatctttaccattttggtcatgttggtctcatcataaactggtttcaaaataggtactacaacacgtttaagctaaacgagaagagcgacgtgtacagctttgggatcgtcctccttgaactcataaccggcaagagatccataatgaaaactgacgacggagaaaaaatgaacgttgttcactacgtcgagcctttcctcaaaatgggagacatagatggtgtcgtggatccacggcttcacggcgacttctcctcaaactcggcttggaaatttgtggaagtggcaatgtcttgcgtcagagacagaggaaccaacagaccaaacacaaaccagatcgtgtctgacttgaaacagtgcttagctgccgagctagctcgtgagccaaaaagcaatcatgagaagaaggaagtagtgaaagagaagtacacgaagaccaagtcgacggttcagaattatagcagcaatgaatataatagctcatctggatcggtttcactttcttttggagattactccacgtttggcccaatggcaaggtagtgtgagaaataagttattttaactaactcaaggtttgattcatcatttgtttttgtcactgaaagtttattttgattcatcatttatgggttctcattttattttattttgttattttcaaagatcatatatgatttaaatttgattcttttggtttaaagattcattcgtttttgttttcttataagaaaatttgttaccacgaaaacattaaattgtaagaacaagcaagttgtctatgtttttttttttttttcaataaactaatcgagcagaaaagtggttaaaggacaaagaaaactaaaacagaattatacggtatgattatttcttgctgtagaaattttgttgtaactatgttggctataactgtaatttttattgctgtagaattattgctgtaagtttttttattttaaatatttataaaaaatagattaacaaatataataattataataaaatattttatttatagtaaataaaatgccttgtattactattttaaataaatatattatgataatagaaaaaaaatctatgaattc

SEQ ID NO: 644 - DNA, 88011 bp, Arabidopsis thaliana
aagctttacatctgaataagtttctctgattttgccttcctttcaggctgttctggatgcacataattctgtaatctctgcgatgaagccaggagtaaactgggtggatatgcacaagtaagtcttactgagatgctatatagctctgttctactatgcatgcagatgcagtaattgggattgacaatgtaagcgtaaactcagttgctttggtccattttgatttatcctcttgttagggagataaattgaaatacatctccatatggttattcagctttctttgtcgactgaagcaaattaatgtacaggttagctgaaaaaatcatccttgagtcactgaagaaggggtccatactcactgggtaattctctctgtgttagacatttcaatactcttctctaaaggttaattcattctcatggtttcgttctctgttcctagtgatgtagatgacatgatggtacagcgcttgggtgctgttttcatgcctcatggactaggtcacttcatgggcatcgacactcacgatactggtggctacccaaaggtacatcaaatcttttttcaacccaatagtatcatcacgtaaataaaaccacagtccctgtgtcttacccgttgctttgatctttcattcttttagggagtggagagaccaaagaaacctggattgaagtcattacgaactgcaagagacctacttgaaggaatggtaagggccgattgtttcaagtagaaatgcttttggttcttctcatttatcgtctctgttcattgtcctaatcgtatttatgtcaggtaataacggtggaaccaggatgctatttcatcaaggcattgctgttcccagccatggcaaacgcaacaacctctaagttcttcaaccgtgaaacaatagagagattcagaaatttcggaggtgtcagaatcgaaagcgatttggtaatgtcaaattcatattcactacaacgtctacaagttaaaacactctcaagagtaatgtcatatacaataatctcattttgttgtatatgtgtgatttcttttttaggtcgttactgctaatggctgcaagaacatgacgaatgttccacgagagacatgggagatcgaagctgtgatggctggagggccttggccaccgaccaagtgatcgtagctactcttaggcagcttatggaaattaaaaacttgataagtaaaactcaataatacaacctttatttttgttaatgggaataaggaaaaattgcctgtgttttactaatcttgtacatgtagtttattttgtttcagtgtcttgtttgtgtggttggatattaaaccgattgaatgttcaagtggacagataaaatctaaccggtttggtgcttgtcgacgaaaaccgaaccggtacagaaaatatcttgagcacaattttagttctaatataaaattcattaacaagagagaaaaaaaaaacttcaaattaaaagcttcgtgtcttcataaaaccctaatctcgcgacttcgtctctatccccaaaaaccctttcctctcttccttcttgtgtgagaccgagaaaaaaagatgactaagaacagtaaccacgacgagaatgagttcatcagctttgaaccaaatcagaacacgaagatacgctttgaagatgctgatgaagacgaagttgctgaagggtctggtgttgccggcgaggaaactccccaagatgagtccatgttcgacgccggagagagcgccgacaccgctgaagtaactgatgataccaccagtgccgattactacttcgattcttactctcactttggtaaattcccttttttcaagttctatttttttccttgtgctctttggttatgaattcttactaagagttgaatttggttccacttttttttgcaggaatccatgaagtaagtatcgaggacaaagctcagttttttttgttatagtttttgttctagaagtttaatgtaattcattgtgttttcttctgtatatatctgatgactgaattgagaatggtatctgacaggagatgttgaaggatgttgtgagaacaaagacttatcagaatgttatttatcagaacaagtttcttatcaaggacaaaattgttcttgatgttggagctggaaccggaattttgtctctgttctgtgccaaggcaggagctgctcatgtctacgctgtatgtcttcaatctttcagtctcttttttaataatcataagtaagaagaatctttttcaattttgactgatttgattgaggatgtttcttaataggttgagtgttctcaaatggctgacatggcaaaggagattgttaaagctaatggattttctgatggtaggtcttttatccatgttgagttgtattcaaatcgataacttctgttctgtaacatgatttttgttttatcgatgcagttattacggtattgaaagggaagattgaggagatagagcttcccactcctaaagtggatgtgattatatcggaatggatgggttactttttgttgtttgaaaatatgttggacagtgtcttgtatgctcgtgataaatggcttgtaagttacagctccaccttgttacatgagattcttagttaccaaaaccaattaaatgaaatcttcttggtcctgtgtttttatggataggttgaaggtggagttgtgctaccagacaaagcctctctgcatcttacagccatagaggattcagagtacaaagaagacaaaatcgaatgtgagtgcattgatttgacacgttttctcgtctttttttttccaacattgatcttgatgtctgttgagatttgcatttttaatttcttttttgttgttctgctacagtttggaacagtgtgtatggttttgacatgtcatgtattaagaaaaaagctatgatggaaccacttgttgacacagtcgaccaaaaccaaatcgtcaccgatagtaggcttctaaaggtatataagatatcatatgatgatgattagtagtatctctttacctgtgtgactaatgttcatttcattattcttatgggtttgtaacagacgatggatatctcaaagatgtcctctggtgatgcttccttcacagctccctttaagcttgttgcacaacgcaatgactacatccacgcccttgtagcctactttgatgtatcgtttaccatgtgccacaagctgctgggcttctcaacaggttcagatctctacaatcttgtgctagctctgagtattctatttttttttggtgcaaagaaatggcatgttatcgaataacttggtttgaagtttaaacatagcacattgtttcattatgatctgaaacttgcactgaacaaccatatgtgtcacatgcaggaccgaaatcccgagctacacactggaaacaaacagttctgtatctagaagatgtgttaaccatatgtgagggtgagacaatcactggaactatgtccgtttctcctaacaagaagaatcctcgagacattgacataaagctaagctattctttgaatggccagcattgcaagatctcaaggacccaacactacaaaatgcgttaaagttctctcataagaagcagaacttcagaagatacaattctcatattgtgatttagtttttatatttctttttctccagattacaactttccatttgcttcacattgcaacatttgcttcatctcaagttaaattaatgattttgctctaaaccatctcgtgtatgttccttgttgatcacaaaactgatgtctgtcaacacttttcaatattctctccaaaagattatagaaactaaaggaaatctacaaaaagcaagtgtgaagaaagagtacattaaacaaaaccagtttaaaactgtttctatagctcagactttccggatttaggtttctttgaagaagacgatccaagtcctttccaccatctccggacccggtttgacactttctgtgcatgtctcttcagagcctcacctttcttcttgaactccttagtgattgtcttcttcaattcttctgttttactctctttctctttcaaaacttttccctaaaaaccaacaaaaccatacaagtgttttagagaaaagaaagaaagatctcggtttccttcttcttcatgaaagtttaacccaaagatttgatcatttgaaaaaagaaactttatgtaccaagttcttgggaaacttatcatcttcttcctcatcttcatcatcgtcgccatcatcatcttcattaccgatattccccttctctatatcttctctagagtataccttcatgccaggtgctcctggcataccctgaacatagcggtaaagagtaagcttaagatcattccatggatatgcattccttgcttagtggtattgattgacgtcatcaaagattacctgcatagatctcaaaatcttgtccatttcagcatcttttgatggttttgcaacaaatggttctccaggaacccgatcctggcaaagataaagaaacacttatcaaaacgtcatctccacagcaacaacataagaacattcacggacacaaatcaccaaagatccacatttcagtttcaataaaaggtaccttgggaacaggaggaggtttcttgctgcaagcatcggtcaaatctttgcatagatgattcaccagtgaaacaagatcaggcttagacttgtaaatatactctgcaacatcagtgtctgagtaaccaatgacctgcaacacacaccaacaaacagatgaaaatcacatttatccaactctaaatactcaaagaaatgcaaatccaattgtattaacagctgaaagaccacattaagctaaccttttgacaagcattctcgatcgtcttgcacttggaattacacatcccttcttcttgttgctcaaccagctacgaacccaaagtcaaaacaaacaaattgttaacagagtcaccagcattgagattcaacaacaaatgtacaagtttccacttatttcaatctcaaagctacaatgtaatattttcggatcaaacaagaagggagagaggtagagaaatctcaattaccacaagattatcgcctttctcaacaatgtcaatcttaagcatccaatcagcttcctctttcttcaaattgcagacattttcagcaatctcaatgatctcatactccgagatctaccatttatttcccaccagcaaattcagtaagcagaaacacatcaaatcaaactagaaagatcactaaaaatacattaaaaactcaacctttttgggagagatctgttgttgcttctccttcactagctggtgtaaccgagaagatagtttctcgcaaacctgacactttatatacggaacatcctcctttctcggcgtcgaagaaggtttcttcgcggcatcggaaacaggtaataacgccgacgaagctagcagagctaatgtaagagctaccagaactcgattcatcacaaccattgaagtcagaagcagagaagctttctctatctctcttaaatatggtaaagtttgggactttaataaaattctttcacgggttctatatagaagatcatgggtttaaagaattctctgggttttgatcctgtgccgtgttcatgaagtggaatcgatgttacgcttgttaacgtgtttcctgcaatcttattggctgttggaatgctgacacgaacttgggtccactttctcgaccatgttagataattactgttttgtttttttgtatgtgtggtaaattattcggatcacagcacaaaatgggccaagcagtaaggcccattaattaatacgactggatggctcaaatgtaattaataggatggagagtggtaaacttgtcattggcaagacgaaaagtggcgtcggacaattggatgttgccgtcgaccaattaagaaagaggagaagtgatttgcagctccggcgagaagcagagctccggcgttgtgtttatatctcagaaaatggcaaaaatcgtgatattatttgatttcgatcggactttgatcgacggagatagtgacaattgggttgtcactgaaatgggactcacagagatcttccatcagctccgtttcactttaccatggaatcgtcttatggtatttcatttattaaagcatccaaaatctcatcctcttcttatgatttacgcatattgaaatcaaaatttgaattggattttgaaaaggataggatgatgatggagctacaatcacaaggtagatcgattgatgacattaaatcttgtttgaagaaaatgcctattgattctcatattattgaagctatcaaatcagctaaatcttcagggtatgaacaatgatcagttcacttagatggtctcagtttctttttttggttgagtcttgagtgttgtttgtttggttcaaatttgcagatgtgatttaaagattgtgagtgatgcaaatcagtttttcattgagaagatactagagcaccatgatttggtggattgcttttctgagatttacacaaatccaacctctcttgatgataatgggaacttgcggatcttgccttatcatagtgatgcattgcctccacatagctgcaatctttgcccttcaaatctatgcaaggtactcttatctatcttttttaactatataagaagccctccatgtttgccttgtagttagacttgcaatttgtttatgatcttgtccattagaatttgggattagttccgagtccaaaagctgaaatcttcaattctagcgttgtacaaatagagattgctatatccattacccttagattggattcagttttgtaggattttgactagtgaaacttcattggttctttcagggtttagtaatggatcatttacgtgcttcttcttccaatgatcaaattccaagaaggtttatctaccttggagatggaggaggtgacttctgcccgacattgaagctgagagagtgtgattttgtgatgccgagaacgaattatccgctatggaagaagatctcagacaatcccttactgatcaaagcagaagtcaaggaatggagtagtgcagaggaacaacagagaatcctgctgcaacttgtcagcacaataacaaaagaagaagattcataacacaataacactaggctttgtttagagtcgataataagtgttactgattaatgcaaaggtgatgaaagaacatttgtttgttcctcttcactaaattgataaaggcattgctttgtgtcatggtaatggaaattaattgctaccagcgtttaaactcaaaagctacattaaaaatgaaggaatttagctaaagctcattcgattttatatttggtagtgtatatcaaaagaaaaaatgtatcagatattgattgaaactgaaaatccaaaaaagaagttaattttttgcaaaaagttggaactatcacttcaaaagaaatttatataccaacagtaaaaaactaagtcacgtgatcgatccttggcacgtgtgaaatttcatcactatatcgttctttgaggcatttcgtcgaacaccatgtatgcaattggaaggggtgtggttttggtcgacgtagcccgccatgatttctctccttaaagctcgcgagaagcttctctctcctctcgtcagttccactatccgaagactctcctctagcctctcctgtaaatctgtctttctctattcccgcttctgctttatgtgggcatgtttagctgaatttgtatctctactctaagctgtgaataattgtgtggtttggagcagattctcgtgaagattcgagggattctgaagtcttaatacacccgagtgctgtcgtccacccaaatgctgtgattggcaaggtttgattcatttactgacattgctttgaggtctctgagttgttttaagaacctttatatttggtgaatttggactttactcagaaattgaacccttctctgctcatttgaagactagaaacagcttaacacttgcaattttcaaattagtagaacaagatggtgaatttgatctaacctggtcaaagtgtgatgctttgtttgagatttgagcttactagactgtggttaaccagaaacattggctaacagggagtttcagttggtccatactgtactattggctcttcagtgaagctaggcaatggctgcaaactctatccttctagccatgtctttggaaacacagagttgggggaatcttgtgttctcatgacgtaaaaacccttccatctcttagattatactctgtaatttattgattgattgattgatctttgctatgtgtctgtcttgaatttttgtcagccagtggtgctgttgttggcgatgagcttcctggctatacattcataggatgcaataacattatcggtcaccacgccgtggttggtgttaaatgtcaagacttgaagtacaaggtgtgtgagagacgttatcttatcacctgttatcgtcctaatctcaccctggttatagactaggaaccgatatatgtcaagaactaatgctgtgttttcttcttttagcatggagatgaatgctttctttgcattggtaacaacaatgaaatcagggagttctgctcgattcacaggtcatcaaagcccagtgataaaacggtatgtagctgaccattgtctaatatcattgaagtttcaataggttgtatcatgttttgagttatgattattactggaacaggttattggtgacaacaatctaatcatgggttcttgtcatatcgcccatgattgtaagattggtgaccgcaacatatttgccaacaatacgcttcttgctggccatgtggttgtagaagtaagattttccttgtgtctatactctaaacctggatttagcagcgtggttttatttggtctatgttgtgaatgcaggacaatacacacacagcaggagcctcggtggtccaccagttctgtcatattggctcttttgctttcattggcggtggttctgtggtaaattttcctctaatacctctcaaatgtcctcatttccaacagttactcactggtacggtaatatataggtctcacaagatgttccaaagtacatgatggtggctggagaaagagccgaacttcgcggtttgaatctggagggacttagacgaaatggatttaccatgtcagaggtttgtactctgtcccaatgttgagtcttttgaagtaagaaacagaatatcactttggagtgttacaaaagaccatgtcttgtttcttggcattggtagatgaagagcctaagagcagcctatcgtaagatattcatgtctactgaaacagtctccttaagttttgaagagcgtctcacggagctggtacgtgtaatcaatgaaaactcacttcactgtcttcttccctgtggatctagtgcataaacatctaaacatattatatctgatgtaattcaggaacaggaccaagagctgtacagtgttcctgcagtatcggcaatgttgcagtcaatccgagattctttcactgaaagtcgccgtgggatatgcaagttcagacaatggctcgattccacaacttagagacttagcttaggcattcagtaatcagcaatggcttattatacctaattgctcaataccatttccttcactggaactgtaatagtttgatatatagctttaactaagtgttgtcaacattctgtgggcacataacatccttaaaaatcacttgtcagagaaaggaaaattcattttggtattatttctaatactgtaatgaagctataacttttggatgctagactcatagatggagatggacttgaaaagcctgaggcagcagagtacctgcaaattccgatatgctcaatatacaaggtatagagagacagagaaccaataaactcatggtcgaaatagaggaactaataaatcgcatctcttcgtgagaccccactttgtttacaaactcgtgaagccatgaagccaaaggaaaatctcaaggctgggaatgcaatcttctacatcagtttcagggactgtggtctgaccaagatcaccgagctgtggtaagaagaaccacagatgggcatccggaacacatgtttcttgaagttaagtgtacggttgcggacttttcgagctgctctcttaactaaactattctgctctattggctacaattggtctgaacacatttcttctaagatgttgcagattatcctctgcttttatttggtgttccaatgtaatctaccaagctgattgttttgtattaaaccgctgcagccttataattccttgaagaatgaatctatatatcattcatttccctttctagccaagcattggatctttcccgtctttagattcagtttttttggagtgttaccaaaagatcatgtcttgtttcttggcattggtagatgaagagcctaagagcatcctaccataagattttcatgtctactgaaacagtccctttaagtcttgaagagctacttaacgaagatggtgcttgttattactcaattctcttcactgtcttttaccctgtgcatctatcgcagaaacatttgtacattttgcattttgcaggaactgaaccaagagatgtacagtgttcctgcagaatccgccatgttgcagtcaatcctagattctttcacagaaaaaggcttatacaagtgttgtgaacattgtgggcacaaaatatccttaaaacagtgagaagaaagttcactttggttggtcactttataataatatacatattgaagatgtgtctacttacattagccgtgagagtaaaggcaaaattaggttttcctgtaaaaatagccagttgcttttagtggcttagtgtagatctcattctcatgtctattcgtgattttagttcaattcattcttctggtctttccataatatcgtttctcttagttctttcttctttgttgtcattaacagtcaacaaaacagctacaaaaacttttaaaccaataaaactgtttggttgaacaagatacctaggtctagttttaaactacaaaagacaatattttgttttcttatcatagaagagaagagaatccactgtttcctttatacagccatagatgttagtctttcaccatggacatgctgaaattgtgaagagaacgcgtttccttttacataactatatacataatatacttgataacaaatgcatggtacatggcattacccgtgatacacgccagcgtgcatatactgcttcgtgcacctcctcaaccttgatgccagaattaggagttgttgccatgatttgagagaatgtaccaactggtatgatctctaaaatatgagcaagaactttcacatttgctcgagttacgggtaacagttcctgtttcaaacaaggaaacatgtttcgactacaatcaatagagagttatctcagttttatacatgtgcattctatagtctttggcatctacttactttaggtttcatgattgacgacatttttgcttgtttctcctgcggattaagaaaagttagttagaaaaccaagaatcttgttttttctatgcatagctatcgatccttttaccagatacaccaaaaaaaagaaacaagatcaacactacataagccaagtattagcatccatttaaacaaatccaggctcaattctactagacccgatgaataacccaaagatctctgctcagaacagagcataccaaagaaaaaaagaaagaaagagaggagatgcaatgatttcattacgctagctagacctaactgttacatacgttcgctatagtttctggctttctgtacacggaatgcaaagaaagggggaaaacaaaaatttgagaaaagataaaagacgttactgttgaccggtgaccaagtagacaatagccggcgacgaaataagcgggaatatcgttatccaatttgacgattggtccaaaaccaaatgagcctagcagagcggaatgaaaatacatcggtctaaacgacggcgtttatctgaatatttattgcctttctacttgtctccgttgccatccgccaaatcgacgaagacgacgattaccaggttcatgaaatctgcttctcacttttattttagccatcgtagatctattttcttatggtcaattcgcttcagtgttttgaaattttgaagccacagctttctggatttgtaatttcgaatatgaaaatcgactgaaattgttttaggatatggaagcagtcgatcgaccgctgcgcattgaagaaaccaccgtatctcatgatgtatctagttgcggttttatatcgaaagaagaatggttaaataaacatccaccatctggatctggatggactgacgaagatgatgataatgacgatgtatttagtagcagttttatatcgaaagaagaattgtctgacgctgtacataacgatccaccatctggatggactgacgaagatgatgatgatcaggttgacccggctttggagaaagagttctatcgccaaattcgcgaatccgacgtaaagatatacatatatatacaggatcttccctgatctcaacttgttcatgtgtgacttttgataataattctcgcatgcagggatttgatgttgacatacgtattccgactagttcactttatgtgtacaaatgtgccaacaatgatgaccttcgtggtgacattgttggcatttgtgctagagtgggactccattggtacaactttcaaaaggttaaaaattctcatcttggtctaaccacactacttgtatttttttactgaattcttctttatcttctttactacctctgatttcagggctcaaaccttgagttgatgcacgtcgataaatataattctagattctgtgcgcttatgacttacaacattactgctgaggctgttgatccagccaacgattcacgtttcactttccagacatgtgttaccagagctacatgtcaaaaagatgaagacctgaggatactgactgaagtctgtagaattaaaccaaagattcaaggtgaatgaatttctgcttttgattagtgggttgttctctttttgttatcataatcttgatgatcctggaaagtgttttaaaaaggtactggagacgaaataaagcgatggaatgacgaagctattgatgatatctacaaaggcaatctacctgagtggatttcggatgatactttgatgtcatgcagtgagcaagatcacttttatagggtgcaagagtcagacatccgagaacacaactggcttcaactatacactgagattgcgtcttactcgctgtgggaaggagacatgaggctcaagtcttgtgtgccgctgcagattaagaatgtccttgtacgaactcgtgaagattttaaatcaaaggaaaagctcaaggctgggaatgccatcttctacattagttttaggggtgtcaatactcctcatggtccacctcaagatcacagagccattgtaagaagaaccgtcgatgggattccaggacatgtttgtcttgagtttaagtgtttgctcatggatctgtgagccgctctattttctttatttgatgttgcaatgtaacatactgaagatcttaacccttaaataatgatattgtttttggtttgtttttctgtttcacatgcctctggcttttggtcatacaatgtgtaaacaataatgttggttgttaatttttatgcctaacttgtcttttgtctccaagacaaagctcaagcttgctgcacctctggagatcaagaaggtcgttcttgttcaaactcgtgaagccatggagccaaccggggatgcaatcttctacattagcttcagggactgtggtctgaccgaagatgaccgagctgaggtaagaggacccatagatgggcatccgcagcacatgtttcttgaagttaagtgtccggttgcggacttgtcgagcttctctattaactaaactcttctgctctattgactaaatttggtctgaacaactcctcttattacagggatcaatatccacattctacaatcttgctgctgatgcaattatttctccagcttcaaagctattgtatcccagaggcaagtttcaaatttaccttaactgttcttaaaccaccaagttcggagacaagacaaaggctccagatgtcaacccacagaggattgtttgaattacctggacttgagctataggatctacagggcattgagtttcgataggatagattttgtaactagactgttggtgcacttaactgattcgatcagctgatacttatgagcctgtagcatcggagcacatttggcagtaaaatgtagcaagaagtttccaaattttagcgatttcgaatacctttccgccaactcctgaaccttggaaacaagacaatcgacggaatcttgggataaagggatgccatggatcaatatgttctggaaaaggataaacagatattcattccatgtcagttcatccgatatgagatctcgatggcagggaaggaacataaacctccgctcttgtgttcttccacaaagcaacttctggcaaaaaccagagatttgacccaagtgcaagcactctttcaaaacccttgaaatcacctcacaaatgaaattgtttatcccttctttcctgagtattaaagggaacaccaatgcatactcagctgctctttggtggatcttgcaaaactcgattgttgaagacatcagcacacgagaggcagacttctcaagagacaaaaactttggaagcacgatcgaacatagaacatggcttggccaaccaagctcttcttcctcacttccattatgcaaactcgaaagtaaaactgcagcagtctcatcatctgcattccaaggctcaatcaaagccaaaactctcaaagagtccttacccttctccaagcaaagtctccgaatgtcgttacacaaggttaaaacttcagaagtagactcaaagttcgaaatctgagctctaagattcacagccatttcatgatcatgagcttgtaacccaacagtcatggtatgatcaatgttatgcacaacttctctctgatcttcttccatatcctctttgatttgagttatctccttcccattccaagaatcaacaaccagcatttctgaatctacatcatcacaggatacaggaagccatggaagaattgtaccagcagaaccaagtttctcactgagccaatcaggtacagagtcaaatacctgcttcatgctgtcttcatcagctgaatccaaatctagattagatatccattcaaattttggtttaggaattctgtcgagcaggttatgtgcatctctctgaacccagaaatcgacaactttattaccaccactacccaacatttctctagccagccaaaccaaatcactaacgcaaaacctctgatactcgaaaagaagaaaagatagaatctttgactgaaccatgttcggtaatgtctcaatgaaaagaaccctaacggagaaacaaaaacaatttcatcagcaacccaaatcggtccagaacatatagaaaaacaaaacaaaaatccaaattgaaatctgggtattacttcttcgtaaccggagatgaattctgatcgcattgtttcttcagcaatgaaacaaacgagctccggttgatcggcgccgccgcagaggaggaggaagaaaaaaggttcgaagcctggtctaaccacagcgaagcctcagcctccggagatggactcttcaagaaaatgtcgaatagtggaatccactcctccattttgtccttccctctctttctctctcaagtctcaaccgtaataaacgaattctctgtcaagtcaaccactttaaaacgcaaacgctctttaaaacgcaaacgctattttggtccactagtattaataaacataaacaatgaatacaagtaaccaaagttactaattctatatgtcagtatgaatttcttcactttcttatgcctcaagaaacttatttcccaatcatagcagaatcaatgtattttaccatgaaaaattaagaccattgaattaatttctacacgctttagttcattactttctactaaactactaaagcaatactaactaatttaaagtaatcgtaacaagtttaaagcaaagtagattgatttgaaaacggttcatgagtcattatctttttagtgtatataccactcacattctcgtttatattttgtaatcttgtgtacgcatgtgattgtttgtttacatacgtaatcacaccctgtcaaaaacattcaacatgcacacagcacattttatttataactaagtttgcaatttcaaaaatcgaaaatatatatacgtatgctggacttgaatattgtaagcaaacacattttctatattggatttgaatatagactgtaacaccacgaagtcatgagtcatgactatgctacaatctaccgaccacatttgaactagcatttcacgaaataaatttcttaatttttgtcatctattactattcataccactaagagctaaagactattgagccatattttactaaactcctctcttcaccacatctagtttttgctaaactacgaaaacaatcctagttactttgctaaaagaatcgtttgtaagtcaaagtcttaagtcatccatgagtggatcctaataagagtcacaatcaccttttgattatgtagtgcagctggttatgtacgtatgtgaatgacattaacaccattttaatagtacaattcaatatgatcaactagcaatttgttgaaaaaaatcttatagttttcatctatataacaatataatataaaactatcaaaatgttattaattaagagtaattaagactattgagccatattttacatctcttcattacattactatcgacatggttttgaaaagatggttcatgagtcttattgataaagaattttaagagtcacagtcacctttttattttgttttgtagagtcggttgcacatgtgattgacgattgacgtaaacaccaattaaaaagtacaattctatatgcacacgacacgacacaacacgggctataaataagttaagacattgctcctcctcttctcatcacttttccaatctctcaacataaaatcccacaacaattcacaacccgaaaaaagacagagacaatggcacagcccatgcgcttcatgctcaatcatatagaaacagaatcctacggcgctttcacccctcaaaaccttagtccgctgatcaatcgtgcgattccacacactcgagctcaaatctccggatcacctgtcgtagccgtcggccgaggatcatcaggtcggaccttctttggcgtcaatgtggaattaccaggtctgcctcttgaccactccatccacgccgaacagttccttctcgccaacctcgccctccacttcgagcaaaaactcgaatgcatagccatctccactaacggctactacttccaggagccatgcggccactgctgccaattacttcataaaatcagagatatgtctgataccaaaatcttgctcacgaacccaaccggtcagaaaggaacatacatgaatctttcgaccttccttccgcaaggattaatctcccaggcaaacgtccctcgccttctcgagcggaactttaactgcatcgaactcataaatcacagtctctacatggatatctgcagttattccgagcattgtaaccatctcaattgcagggctctaaaggcggcgaccatatcgtacgcgccggatagcaagtgtccgtcgggagtggcgctgattgatcaccgaggtaaagtgtacagtggagggtacatggaaagtgtggcgcataacactagtttggggccagtacaagccgcactggttgacttcgtggctaatggcgatggccaagagttcaaaaatatcgtcgaagcggtgctggtggagaagaaatgtggggtgttgagtcaagaggccactgcgaggatgattttagagaagatagccgaccccgactgcattttcagggtcttacattgcaaataagtcctcacactaatgtgggaaacgagactataactcaacaaaagaaatatgatttataatagtttaaaatattattaaaaaaagttagtgataataatgtaagggcaaattatttcccagtatctacatggatattttagtttgaagttcatcgttgaataatttttacagaaaaagatggaaacaacttatttttcgaaccctaaaaaaagtctcagtacacaagcatgtatcatttccccttaaaccaatcctaagaaataacaaattgcgtcaagtattagcaatagttcttcgaagattagtaacctcatgtaagacgttacgttagaagtcctagtcagagttagagaaaataaagtgattaaaggttgagacttgctgaaacataaaagtgacttctctgacatgttcacgtcattatcgacttgtggtttctcaaccaagtccatttgtcagccactagatcagtttctttttttgacaacataaactattggatgatgaaatgaatcggtaataatctatttttttcagttctgtagtagttatataactttctgaatttaaggtcttgattgtttcttttttacttgggatgcttttatgttaattagtagaatggttcatctttttttcccaaattctgtttattttcctattcatactatgaaaatgtcactaattaagaccattgaattattttctacacgctttagtacattactttctactaaactactaaactaatacttacgctttttaagtaatcataattacaagcaaagtaaattgatttgaaaacgtttcatgagtcatatgagtattattagtgtataccactcagagtctcgtttatattttgttatcttgtgtacggatgtgattgtttgtttacatacgtaaacacaccctgtcaaaaaacattcaacacatgtacacgacacatattatatataattgtttgcaatttcaattacatatatgtatgaattatgatggacttgattatcgtcagtaactcaaaacacattctagattggatgttattttgaatgtaaactgtaattcaccacgaacccactatgctagctaattgctacagtctaccatgcatgcacatttgataactagcatctcacgaataaatttcttaatttttttccatctatataaccattataatatttctattaagagctaaagactattgagccatattttactacaatctcgtcttcaccacatctagatcattctgcgaaactacaaaaataatcctagctactttggttaaaaaatcgtttgtaaataatccagagtgattcctaataagagtcgcaatcaccttttgattatcttgtgcgtgttacatacagtatgtgaatgacgttaacaccatcttaaaaggtacaattcatatgcatgaacaagcaatttgtgaaaaataaaatcttttagttttctatatataactatataataaaactatcaaaatgttattaattaagagtaatttaagactattaaaccatattttacatctcttttttacattactatcatctaaagtagttttctagtttttaaaaagatggttgagtctatcataagtctttctgatagtgaatataagagtcacaatcaccttctttttttatatatatatgtgtagtgtggattgcgtatgtgattgaagattgacgtaaacaccatttaaaaagtacgatactaaatgcacacgacacaacacaacacacaccagaccggctataaataagttaagattttgcttctcctcttcttatctcttttccactctctcaacataaaatccaacaacacaacccgaattaagacaaagacaatggcacaacccccaaacccttatgccgctctcactccaacagaagcagaatcctccggccctttcgagcccgaaacccttttgccgctgatcaatcgggcgcttccactcgctcaggctctaccctcgcagtcacccctcgtagccgtcggccgaggatcatcaggtcggaccttcttaggcgtcaatgtggaattaccaggtttgtctcctctccactccatccacgccgggcagttccttgtcgtccatctcgccctcaacaacgagcgaacactcaactgcttagccttctcctcaaacggctcctacttcgaccctccatgtccccactgctgccaacttcttcaagaaatccgaaatgcgtctagtaccaaactcttgatcacggacccatcccgccagcgcgacatgtctctttcgacctaccttccgcaaaaatatttgtccctctacaatgaggtcccgaaatacttcttcgctcgccttctcgacgaaaatcgcaataacggcctcaccctcattaatcccaatcccatcagagactgcctagattccgaaatttgtaaccatctaagctgcagggctctaaaggcggctaaccgatcgtacgcgccgtatagcaagtctccgtctggagtggcgctcatggattttcaagggagagtgtacagtggatggagcattgaatctgtggcgaaccctattttgggggcagcacaagctgcactggttgacttcatgactaatggtggcggccacgagttcaataacatagtccgagggtttctggtggagaagagagatgcgaagttgagtcacttggccacggcgagggagattctaaataaggtagcccacttcagcttcattttacgtgtcttacattgccagtagccggtgaagtcctcagaataatgtgagaagcgagacgagaactcatccttaaacattaaaaaaaaatatgatcctataagtcctcagaaatatgatacaataattatggcaaatgtaagggaaaatattaacctagttgggctagctattacgtttatatcagttatgaaactgaagataataaataatatgatacatttatataagtgttttcttcttgggttcatggtagtacgttaatagcatcaatgcacttagaaataccttctttgttactgtattacattatttaattgacattgaaccatatataataatctgaaatgatacagttgtagactctctctctttttttctaaagcaaaatacagtgtttttttactcatgaatctccatcaatgagtgaaaaagaggattttgcaaacatattaaagtagacatggtgtcagaatttttattagtttgaagtttatgattgaatcctatttacacaagtatgaaaataaatttggttttagggacataaactctaaacgacgccgtaatattcatcatgggacaatctacaaaaccggcgacgaaaaaaccctaaaatttattttaggcgttaattacaaagtgattatttgtatctcatggattaggtattgctgtcatctagagttttgtttaggatatggaagcagtcgacgaaccaccgatgcgcaaacggaaagttgacgagttgatgcacgtagataaatatttgtctctaccactgatttcagggctcaaaccttgagttgatacacgtagataaatataattctagattctgtgcccttatgacttaccatataattgctgaggctgttgatccatccaacgattcacgtttcactttccagacacgtgttacgagagctacatgtcagaaagatgaagacctgaggatactgactgaagtctgtagaattaaaccaaagattcaaggtgaattgctttatggttttgattagttgattgttctttttgttatcataatgttgctgatgctggaaaatgttgtaaaaaggtactggagaacaaagcgatggaatgacgaagctattgatggtttctacaaaggctatctacctaagtggatatcggatgatattttgatgccatgcagtgagtaagatcagttttatgaggtgcaagaatcagagatccgagaacacaactggcttaatctatacactgaaatcgcattatactcgatgtgggaaggagacatgaggctcgagtctgtgccgctgcagataatgaaggtcattgtagagactcgtgaagctgtggagtcaaatgaaaagttgatggctgggaatgcaatcttctacattagtttcaaatacttgaatgctcctcatggcccacctcaataccacagagccattgtaagaagaaccgttgatgggattccaggacatgtttctcttgagttgaagtgttggctccatgatctgtgaaaagagaatccagttctcgaagaaaagtattatcgtcaaatttgcgaatctggcttcagattctttatatgacattgttattagtgttgagagagtggcacattctttataaacaagatttcagaagttcccttgtcttaatcgaagaattagtttcctcggtctctactatgtgtatacatgatgtgcttggatctcaggtttaaaccatggggagttttctagagtaaacaacgtacataggatctgaacgccctggatttggagatatatcaacggcctggattgatcaaaagttgaaacgaattcatcagaaagaaagagtaaaggaatctcttagaaggctttctctgagaaggagtgttgatgaaatatacagaaatacctgaggagcttcaaatcctccggcgtagtgaaagtatgatccaacaatgagagcatgatctgcgtcgccagttgatgtccatatcgagattgctttagtaaagaagcaacggttcgagaagctgcaaagaaaaaggaagtgatcaggttgaaaccatgcgaatatgtatatcatcattacggtttcacaagacttgataggttcattttagagagaacctcattagagcgagtcctccgggcttaaggattctgttcatttccttgaacacttcaagcggctttgtaagataatccacacttacctattaatgaaataccaagaaacatataaatttgtaagaacttgaggttctcagttaagagataaatgagaaagtttggtcataccacataccacattggttataacttggaaagaattgtcttcaaaaggcagatttgaattgagatttaagtcttggactatgtactcggtgagaacctgaaagagagtattagatcctatgatatgacgatccatctcatctctaagtagtacaatacataatattgaatcttctttaccggatttcgcttaagctcttcttcattcatacccattccaactattcgttcttgcctataccccggtggataatgactgacctatgtaacatcataacagccaatactcttaacttgagagatttctcaacagaaactaaaaaagatcaaaaggatttggatttagtacatacccaactgctacacatatcgagtatgctcactcctggagtatcgctctgaggcaaaaccttggagtaatactttgtcaatgcagctatagctggatcatcaatgtgtgtcacaaaccttggagcttcgtagaatgttgaatcagacgaccttaggacacaagtcaacaagatctaagtatgtcccaaagcaaaaatatagctcaagcatgcctttaagataagaaaacagagcaagacaataacaaaagcttggaattgttgtatcttactcatcgtatctctggaaatcttcttctttgaaagggaaagtctctggccaatccaccttattcaacgcctaaaaccaagcaaaagagttcaaatttcataaagctacaaactttgaccaattaaacgacatttcgatttctgaatccctaaaggtacaaactttgaacaattaactaaagagagtaaagagacctgttcgacgggagaaggattggtctgcctagcggaagcaatgaaagatttaccgccaaatttaccggacatattgttgttcatccacaaagaagcgccgccaaaaccaccgagaaccaaccggcgacgtgaagaagcacgaatccaactgtggaaaggtttcgaagcagttgtcggaagattcagagccgaggaagctcggaggaaaggagagtttccggtggaggagaaaatcggaggtagaggattggatctcaggctgagaaaattagccgtttttgacattgtttcattaattgttgggttttgtctgatttgtaaaaaggtttgaactttgcaagacagaacatgacgatgaagatgatgtgtcgcatatcgatcgatgaagatgacgattcgagtttagtgatccaaaccactcttacgtggtcgtttctctctgtttggggcttttctttactttttacaaagttatggggagtaactgtaaaaatataataacgtttattgttacaaaaattagagtaacacaatcatccttcttaaaacgtttcaatccatattcactcaaaaaattaactggaatccatatttttcgaacaaatatatatcatacatttaagttcaaaatgatctacccaaagtgctcatttctgaacaagattcaattttaaacacaaagagaaaatatatatatagcatggacttagagtattatttgatatttttatattgtcacaatctcacacaaactcaatgaatttaattataactttttaagaataagattcccaattttcataccatgaatttatgactaatcaagactattgaattttatttttttaaccattctttagtatagaatttaaaaaaaaaaaaaaaaactaaccttacttacttttaaaagcaattttgttttgagaaatggttcatgagtcagcatgagtcttgatgacggagatacagtcataatctcgtttatattcttgcctgtccatgtaattctttacctatattaattagtactattcaaaccattaaatgttactactcagtaaaagttaattaagaactacttagtcttcctcgaataaatactcttcattacagtacattactttatactaactagaaaattaaccctaattactactttgctttaaaagctagttcatgaatgttgatcgtcacaatcacctttttttaatcttgaagttcacacactaactattgttttgagtatacgaatgacctaaacacgattttaaaaagtcctttcacaatatgcaaacagacacgacacacctatataaataggcaaagactcaataccacttctcatctcatttcatatctctcaaccaaaaaaaaactcgaaacacgatcctaaatggcccaacgtcctaacttgttaactcatttccaaaatctcgtgtagaatctcaaaacagggcaatggcggcacaagataagtacaagttcgttttcactgccaaagaagcagcatcggaaggtgtcaccgaacccatcagacttccaaagctgatcagaaaggcgatgtctctggctcggggtccaatctccaaatacaaagtcggagccgttggacgcgcatcatcgggtcgggtctatttaggcgtcaatgtcgaattcccaggtcttcctcttcaccactccatccaccccgagcaattcctcgtcaccaacctcgcactaaactccgagaaaggtctccgtcagttagcagtcgccatctctagtgactgcatcgaattcggcgcgccgtgcggaaactgccgccagtttcttatggagaccagcaacgagcttgacatcaaaatcctgctcaaatcaaagcatgaagcagaaggatcattctcgagccttaagctcctccttccgtacagattcacccctgacgacgtcctcccaaagggttcccctctccttctcgagaagcgcgataactgcctcaccctttcgggttctaccgaagagatatgctcatcagattgttcccatttgaagtgcaaggctctagccgcggcaaacaattcgttctctccgtacactgagtctccgtcgggagtggcgctgcaggatgacgaagggaagtggtaccgtggatggtacattgaatcagtggcgtatagcccaagtttgggaccggtacaagctgctctggttgatttcgtggctcgtagccgagggaaagggttcaataagatcgtagaagcggtgcttgtggaaaagaataacgcgagggtgagtcaagagcgcacggcgaagatgattttagacactatagcagctccgaactgcgatttcaaggttttccattgctacgtggatctccaaaaaaagtttattactgaatagtgatagataagaaaaatctatactactagtaaggaaaataatagccagtagggaattacactggccttcgttatttaactattttattatcctatcataattatgctttgtttacttcttggttgggttcgttaaaccttttgataatgtcacagaatcatatttatgttgtgttttcttctttggttcaagttacctttcagtggtgtcagtataaatatatttataatgatgttttgttttgcttctttggttcatgttaccttacgaaattaattggtgaattgcttctcttctaaaatgtgaacaaaaacttttttattgtttttgaaaaaacggaaagaaacaaaaatatgtcttcgaatggatcttctttatgagtaagacaaaagcctcatttgcaaaaatatcaaggtggggaataagtggaccattgaggaacaataaaactatcacagaatttcagaagagttggtttcataattgaatataaacatttttttcgtaaacgagggtaacaacttctttctgaactcctaatattgtctaattacagaagtataatgctgtatatatcatttcccttagaccgaccattagcaagcaatagatgccatgagattagtctacttgcaaaagtataaaggtgtatcattacaatacataagttaaaagttaggaggttccaggaagtggggtttggtaaatatagtcaaaggttgaaatatttttgagaatttctttttttggtataatgttgagatatttttgagaattgattgagacatagaagtgtgatttctctgttctgtccacgtcatcttgggtacgcatgtgatttgattctttatgttattatttatgttcgtctgtatttctttgaaagcgtgttatatataaaaaatctcattgacataaacacttgaggtagatacaaattaagaaaatgaagttcgtttacactcccagcgaagcagcagaggagggcgtccgcggaccctcggaccttccaaagctgatcgacaaggctatgtcactcgctcgggctccagtctccacattcaaagtcggagcagttggactcacatcatcgggcgaagtcttcttaggcgtcaatgtcgagttcccaaatctccctcttcaccacaccatccacgccgagcagttcctcgtcaccaacctcgctctcaactccatgaaaaagctcactcatatagctgtctccgtcaccggcaccatcttcggtgcaccatgtggccactgccgccagttttatcaagaaatgcgcaacgctcctgaaatcgaaatcttgatcaaaagaccaaaagacggcatagacgagttcatgagcctcaagagcctcatgccggaaagattcggccctgatagtatccttccggaagatgcctccctccttctcgagcagcgcgataatagcctcgtcctctcggatcccgaagagatatgctctgatccagaggattgttcccataccaagtgcagggctctagcggcggcgaacaaatcgtacgcgccgtacagcaagtgtccgtctggagttgcgctgatttgcggaggggaagtgtataaaggatggtacattgaatctgttgcgtataacccaagtttagggccagtagaagctgcactggttgattttgtggctcgtggcggaggcaaagagttcaatgagatcactgaagtggtgctggtggagatgaaagatgtgaaggtgagtcaagaggccacggcgaggacttttttggacaagattgcccccaagtgcgatttcaaggtccttcattgctataagaccaataaaaattaaagcatatttaaggcaaataatcttaaatatgctttaatttttaagattggattattatgctttgttgtcttcttgatttaattattatgctttgttgtcttcttggttggatttataagacccttttattaagtcgtcatcactgacaaacttctactaagtgcacaattaaggaatagtcaaattgtctcagaatttaatgatctattgaaaataatttttcataatcataaaagatggtaacaacaaatctttctgaatccctaaaaatgtctaattacaaaagtatatataaagctgtataattttccctaggccgaccataagcataacaaatagcaaagatgctatgagattagtctaattgcaaaagtatatagaagtgtatcatttcaactttgaatttgtgagttgtgctagctattttcttcttttcccaaaaaaatcatatgtttactaaatttaaaatcgtctatcaaaaaagcacccattcgatccgagggtcatttgcaatttcaaagaagtaaatatcgatgtatataatggacttaataattattgtcacagtctcacaagtactatgcaatcaatttagttatctagttcccaattgttatctagtatttactagtcataccatgaaatcatgtgcctaattaaagactttataattattgttttttacaactcttcagaacagttatcctaactatcagtataaagcaaattagctttgaaaatggttcatgagtcgtcatgagtcttgttggcaacggatacagtcacaagtcataacctcgtttagattttgtaatcttgcgtgtacatgtcattcttcacccttacggtaaacacgttatttaaaaagcattcaacgtgcacatttttttaccattctttagtatagtacattttacaagagtgctagagtaaccgtaaacaacttaaaagcaaatctgttatgaaaattgttcatgagtcttgatgacggagggacatcacatttcacataatctcgtttatattcttgcatgtgcatgtaattctttacatacgtgataaacacatttttagaagcattttatatacatctaacacacatcacacatcttgtactatttttagtttgaaattttcaaacacataattctatatcagatttgacactatcaaaataatcgctatgctacaggctgctacggacaattgaactagcattaaatttgatcaatattactgttcaaatcattgaatgttaatgctaaataaaagttaagaactatcattatattactttatattctatatactaactagaaaattaaccctaactactttgcttaaaaagctagttcatgaatgttgattgtcacaatcacctttttatcttgtagttcacacactaacgtattgtttgcgtatacgaatgacctaaacacgattttaaaagtgcttacacaataagcacacagacacaacacatcaatataaataggtaaagacctaatctcacttctcatctcattttcatagctctcaacataaaatcacaaaacacgacaatggcacaacgtcctaacttgttatctcatttgcaagatctggtcaccaaatttaaaaacatgacaatggcacaagatcggttcaagttcgttttcactgccaacgaagcagcgttggaaggtgtcaccgaccccatcagacttccaaatctgatcagaaaggcgatgtgtctcgctcgggctccaatctccaaatacaaagtcggagccgttggacgcgcatcatcaggtcgggtctacttaggcgtcaatgtcgacttcccaggtcttcctcttcaccactccatccacgccgagcaattcctcgttaccaacctcgcactcaactacgagaaagacctctgtaagttagccgtcgccatctctactgacggcctcgaattcggcacaccgtgcggaaactgcctccaatttcttatggagatgagcaacgcgcttgatatgaaaatcctgtccaaaccaaagcatgaagcaggatcattctcgagccttagactcctccttccgaacgtcctcccgaaaggttcccctttccttctcgagaagcgctataactgcctcaccctctcgggttctgccggagagatatgctcattagattgttcccatttgaagcgcagggctctggccgcggcaaacaattcgttctcgccgtacaccgagtctccgtcgggagtagcgctgctggataacgacgggaactggtaccgtggatggtatattgaatcagtggcgtcgaaccctagtttgggtccggtacaagctgcgctggttgatttcgtggctcgtagccgaggcaaaatgttcaataagatcgtccaagcggtgctggtggaaaagaataacgcgagcgtgagtcaagagcgcacagcgaagataattttagacactatagctccgaactgcgatttcaaggtctttcattgctccgtggattgcgcaaaaagactgaagtatcttcgtgaaaccctggtgatagatacgttaggggattacactggtcttcattattaaactaatttattattctatcataattatgctttttgtttacttcttggtttggtttggttcgttaaaaccttttagatttttaataatgtcatagaatcataattacgttatgttttcttctccggttcatgttacttttaatttcagtggtgtcaatatataatatattctaattatgttttattttcttctttggttcatgttacgtttttgatataatttcaatgtagtaatcttacgatctaaaatcactttgtgcttaattataaatgtcaccttacgaatattaatttgtgaattgcttctcttctaaaatgtgaacacaaacttttttactgtttttacaaaatgcagaaaatatgtcatttttgtcccaaaaaaaaagaatgaatctccattaatgagtaagagaaaaagtctcgtttgcaaaaaatgtcaaggtggggaagaagggtggaccatttaccactgatactttcttattatttatggtaatttttattttttgtagcaatactaatcaagtgtaacacattattaaatgtagcatatacaatttttcccatactaaattatgattcttttctttaaaaaagtttcagtccataacttaagaaacatttatctggaactaacttaagaaacatagaatcacatgaacttttaatttgtgtatagtaagcttattttcgaaccaatataccatacattttttagttcaaagtgatctacccaaagtactcgtttctgaacaagattcaatttcaaagacaaagagtaaatgaaaattcatgtatatcatggacttgagtattattagatatttttatattgtcaaaatctgactcactattcaatgaatttaattatcacttttgtgaataagattcccaatttttgtttgtttcagtatcataccatgaatatgtgactaattaagactactgagttttctttttttttaaaccattttttagtacaatactttctacaagactactaaaataaccctaactacttaaaaaaaaattgttttgagatatggttgagtcattatgagtcttaatgagggagatacagtcataatctcgtttatattcttgcgtgtgcatgtaattatttacttacgtggtaaacaccattttaaaagcattcatatacacctaacacatatcacatatcaagtcattttagtttgcaatcttcaaacacatattcaatatcagatttgacactatcaaaataatcgctatgctacaatctaccgacaattgaactagcattttacaaataaacttcttaatttttatctatattactattaaaccattaaaatgttactactaaataaacgttaaggacttttagtcctcattacgttaatgtttatttatatatactcttcattacattactttatactaactaaaaaactaaccctaattactttgcttataaactagttcatgaatgttgatattcacagtcaccttttttaatcaattgtagttcatacactaacatattgtttgcgtatacgaatgacctaaacacaagttttaataagtacttacacaataggcacacagacacaacacatctatatagataggtaaagacataatctcacttctcatgtcatttcatatctcaaaacacgacaatggcacaagatcagtacaagttcgttttcactgctaaagaagcagaatcggaaggcgtcaccgaacccatgaggcttccaaatctgatcggaaaggcgatgtcactcgctctggctccaatctccaaatacaaagtcggagccgttggacgcgcacgatcgggtcggatctacttaggcgtcaatgtcgaattaccaggtcttcctcttcaccactccatccacgccgagcaattcctcgtcaccaacctcgcactcaactccgagaaaggcctccatctgttagccgtcaccatctctactgacggtaacgatttcggcgcaccgtgtggaaactgccgccagtttcttatggagatcagcaaagcccttaacatcaaaatcctgctcaaatcaaaatatgaagcagaagggtcattcaagagccttagactcctccttccggacagattctctcccgacgatgtcctcccaaagggttcccctctccttctcgagaagcgccataactgcctcagcctttcgggttctgccgaagagatatgctcatcagattgttcccatttgaagtgcaaggctctagccgcggcaaacaattcgttctcgccgtacactaactctccgtcgggagtggcgctgcaggatgacgacgggaactggtaccgtggatgatacattgaatcagtggcgtctagccctagtttgggaccggtacaagctgcgctggttgatttcgtggctcgtggcctaggtaaagggtttgataagatcgtcgaagcggtgctggtggaaaagaaaaatgcgagggtgagtcaagaacgcacagcggagatgattttagacactatagcagctccaaactgtgatttcaaggtcttccattgctacgaggatctcgtaaaaaaaatgaattatattacaataccggaggtagagaacggtaaaaaaggatacatagtaaggaaataatacgccagtaggggattacactggtcttcgttattgaactattttattatcctatcataattattatgctttgttgtcttcttggttgggttcattaaaccttttaataatgtcatagaatcataattatgttttgttttcttctttggttcatgttaccttttactataatttcagtgtagtaatcttaacatctcaaatcactttgtacttataaatgtcagcttacgaatatttaagagttgcttctcttctataatgtgaacaaaaacttctttttttgctttttgcaaaaccagaaaaaaatagtctgaatctccattaatgagtaagataaaaaattctcatttgcaaacatatccaggtggggaataagtggaccattgattgaccactggcaaatttctactatagtacacaacggaggaacaataaaactatctgatttcataattgaatatatatatttttcataaaagatgggaacaacttctttatgaacccctaaaaattaaatgtataattataaaagtataatgctgtatcattttccctagaccaatcctaaacataacaaatagcagtagaagcttagtctaattacaaaattataaagtgtatcattgcaacttgaaccgtaaccaggtaacctccatggtaaaaagttaaaagttatgaggttcaagaaggtgggattttctaagaattttgttgagaattgagacataaaagtgatttctctgttctgttcacatcatcttacgtgcgcatgtaatttgattctttatgttactctttatttctttgtagcctgttataaataaaattaaatgtacaattgataaatgtaggatatactatttaaaaacataaggatacagatgttaattacgtcatttttaataaccgtatgatgtattcccagaaagatattgtatgcaataatggcaataccaatttttattatcatggacatttaggttgcttaactactcgtataatctaagctgaaacccattcacagaaaatgtcatgcatgtgcttattagttttgtgagctgatttccactctttttataaagtttttctccttctcattcatttctcttttttattatgaaggactttaattaatgtttattattttaaatagttttcaatccattcttcacttaaaaaattaactggaaacttaataaacataatcatatcacatagtttgaactttgaatttgtgagttgtgctcgcttgtttttttccaaaaaagaatcataatatatattaaaattgaaatggtctaccaaaaaaacactcattcgcaatcagtttagttatcattttatgaataaaattctcaagtgaggtctattttacttatttattccttgaaattatgtgcctaaggaaagactgctatataattaattttcttacatctcttcagcacagttggtttctacaaactactaaagtaatcctaactactataaagcaaattagctttgataaatgattagtgagtcatcatgagtcttgttatcgacggatacagtcacaaccttgtttatattttgtaatcttgcgtgtgcgtgtcattcttcacgtacaatgtaaacacgttattttaaaagcattcagcatgcatacatcacacatatctagactttactaatctagtaatagtttgttttgtcaaagttaatccagtctagtaatagttagtgtgcattttctaagaaaaaaggaacaattatttataccatggacttgaaatcttgattatcatcaattatttttccgtctaaataaatcaaacacattctatatcgtatgtgtgaccactaaatcacgagtaaacatatatagaatttaccaacatttgaactagtattttacaaattaacttcaaattatcttttttttaaatctttataactcttcaattcaaaccatcaaaaatgttactacttgcgagttaaggactctagaccattcttttccactcttcattacatgtactttatattaagcaagaaaataaccctaattactactttgcttaaaatttcataagtcttgaagtggatcacgtcacctttatttcttttattataattagtttcgtatgctaatgagtaacgacgtaaacacgattttaaaagtaacttttgaataatcacacggacacggcacatctatataaatagcgagagacttgagtccacttctcatctcatttccaatctcttaacacaaaatctcaaacacgatcccaaaatcacacagagacaatggcacaacagtacaagttcgttttcactgccgaacaagccgcatccgaaggtgtcaccgaccacaagaaacttccgaagctaatcagaaaggctaggaatctcgttaaagcaccaagcaaagtcggagccgttggacgcgcatcatctggtcgattctacttaggcgtcaatgtagaatttaaaggtcttcttcctcatttttccatccacgctgagcaattcctgatcgccaaccttgccctcaattccgagccaaaactcactcacttagccgtctccgataatggcaccgtcttccaagacccgtgctacgactgcacccgctttcttaaggagatcaacaatgcacatcaaattgaaattctgatcaaaaacgctcacggccgagacggatcattcaagagcctcgagagccacatgccagacgaattcggctccgaaagtatcctctcggcagaaccctctctccttctcatggagcgcgataactgtctcgccctcatcgatgaagattccgccgccggagggatctcctccaatgcggacctttgttcctttctaaagttggaggctctaaaggcggcgaacaaatcatacgcgccatacagaaagtgtccgtcaggggtggcgctgttttgcgaaggggaagtgtatgcaggatggtacattgaaacagtggatcggaccattagtttggggccagtacaagcggcgctggttgatttcatagctcgtggcgaaggcaaagggttcgataagatcactggagctgtgctagtggagaagaaggatgcgaaggtggggcaagaggacacggcgaggaagcttctagagaagatagcagctccgaactgcgatttcaaggtcttccattgccaggaggagcgtaaagattggatcaccggagctgtgctagtggagaagaaggatgcgaaggaggggcaagaggggaagcttctagagaagatagcagctccgaactgcgatttcaaggtctcccattgcgacgaggagctcaaagattggatcaaactataattaaagggataagtactttatatttatacgatgatgatagttaactgatgcattactactatgatagataaaaaaaaagttaatacaaaggatgaaataagccaataggggaaagacattggtcttggttattaaaccatcatcgtagtttatgttttgttttcttcttcgcagggttcatgttacctgcactcataaataatgtcaatgcagtaatcttacgatcttaaaacactatgcacttataaatacaatgtcaacttacgaatattatttagtgaattgcttcttttcaaaaatgtgaacaatagcctctttattgttttgcaaaagcaaaaatagataaaaaatgcttttgcatgactctcaattaataagttagactaagtgaattatattttaccactttttgagtacattactttcgacgaaactactaaagtaatactaacttctataaagcaattatgctttgaaaatggttcatgagtcatcctgagttttgatgacggatacggacagaaactcgtttatattttgtaatcttgcgtgtacatgtgattattcacatacgaggtaaaaacactatttcaaagcattatattcaacatgcacacacttcacatatctagtaaaagtaagtttgcaattttcaaagacaaagggaatatctatgtgtattgtgtggacttgatatattagatttttagatgctttcttttcaatattaataacgtatatacattttctatatcatattctacgagtaaccactatcctacgatctaccaacatttgaactagcatttcacgaataaattttcttaatttttattttttttgggtaagtatatgattcttagtagaatttttattactattatttttcttcttctatgcaactattcaaactatcaaaatgttatgaatttagagttaaggactaatgatttatattttaccactcttcattacatttatactaacctagagtaatattcataattatatttgttaaaatgctatttcataagtcttgctagtcacactcacctttttttttaacttgtagtgttggttgcgtatgtgattaacataaacaccattttgatttttatctacattactattcaacccattaaaacgttactattaatagttaaggacttattgaataatcttttactactttagattatattgctttctactaaactagaaaaataatcttaactatgttgctaaaaaaatgggttcatgagtcttaatagtcacaatcaaatttttcatcttgttgtattgttatcttaattgcaatgatgtaagctccattttaatttatttatatattactcttttaaccatcaaaatattattaattacgagtcaggactattgacctatacttttaccattcttcattacatttactttctactcatgcaactagaaaattaaccataactacttttcttaaaaatctgtttcatgagaatggaagtgttgcaatcacctttttatatatcttgtcgtaagtaattgtttgtgtatacgaatgagtaaacacggttttaaaaagtactttgacaataagcaaacagacacaacacacctctataaattaaaaaacaactataggcttgcttccacttctcatcttatttcatatctttaaacatataaactccaaacacaatcctaaatcagacagagacaatgacacaacagctcaaattcattctcactcgtgaagaagcagcatccaaaggcgtctccaggcccagtgacttagtgaagctagaagaagaagcgatgatcctggctagggctccaatctccggcgtccaagacgcagtccttggacttgcctcatccgatcgaatcttcttaggcgtcaatgtcgaatttgaaggccttcctcttcaccactccatcagcgccgagcaattcctcgtcgctaacctcgcactcaacttcgagcaagaactccacgcttgcctcattccgtctagattctacctcgaaagcttcgaggaagacgtccctctccttctcgtgccgcagaataaccgcctcgcccactcggatccattttccgccgcagagatctgctcaaaccccgagcattgttctcatcttaagtgtagggccctaacggcggcaaacaaatcgaacgcacagtatagcaagtgtccgtcaggggtggcgctgatttgcgaaggggaagtttacggaggatggtgcattgaatcggcggcgtataaccttagtttgggaccagtacaagcggcgcttgttgattttatggctcgtggcgaaggcaaagggtttgagatgatcactggagctgtgctggtggagatgaatgatgcgaaagtgagtcaagaggccactgcgaggattcttttgaagactatagcccccgggtgcaatttcagtgtcttccgttgtcacaagaccgcagaaaattgaagcatgtttatgctgccttgatgatagattactgatgcgtatactaaagatgatagataaaaaatgctaatataaaggaaactaacccagtgggggaattacacatgcatattctggtgattaaaacttatgatgataaaatagtattaatcataattatgttatgttttgggcttcttctttggttttatgtattgttaccttaattaccttttaaataatgtcaatgcataatctttcacgatgtcaattcactttgcacttagaaatgtcactgtttttgtttgtcacaatacttggctccaaacgaataatattctgaattgcttttgtcattacgaataacatattgttctataaacctacgattatccgatttttttcctacattagatacggaccttattaaatcatatattattgtgtcttctgtttatgataaaattaaaataagaatctgacgtaataaagttatcgaaccttttttggttttgcagaagcaaaaaaaagtagtaaaatagatatctttgcatgaatctccattagttggtaaaataaaagtctcacttccaaacgtatcgaagtagagaataatgtggtccactgaccaatggcaaaactcctactaagtgcgcaattggataataagaatttagaagggttgaatttaaggattatatatttgtttttcacagaagatggtaacagcttccatgaactcctaaaagtcttattacaaaagtataaagatttatttaatttccacatttttgtttttactatattcaataccatgaaaatgtgacgaactacaactattgaattattatttaattactactctttagcacattcctttctagtttctactaagctactaaagtaatcctaactactatgaaacaaattttctttggaaaaaaggtcacgagtcattatgcatcttgaataattttcttattttatatatttactattcataccatgaaaatgtattaaagtaaaattatttcattgattttgaccactctaatttctactaaactaccaacgtaatcctaactactttttgtttgctttgaaaactggttcatgagttaatttcaacaagaaaaaaagaaaaatggttcctgaatcacacatgaatcttataatgtaatcactcaatctagtttgtatgttgtaatcttacatacgaggtaaagacatcgaagtagagaataacgtggtccattgagcaaactcctgctaagtgttagggccggctcaacactatcaaaggccctagggcaaaataacattttgggcccataaaaccttttttgggtcttttagtatataaaaaaaaaggggagatttttataaatgtaccaaattttattaaaatcttgaacaatatacccaatatatggatatttgaaaactacagattttttattgaagttttaccataattaaatataatggataaaattaattgacattttctaaaatagtttgaatatctaatttcttaaatataaacagtttagtttaaaaataaaatttgttataactaattaatcaatttatttagtgtcttatttctaatggtttctatttattaaggacaaacatgtcattttaaaaccaatataaaatatatttcaaatagtgtaatattatagtgtagatttcaaattaatactaaaatataaggtatacaatcaaattaatcctaaagtaaaacacttctgcaaaatttatataactagttgtttataatcatatgccaataatcacaatacaataacttcttaaaagcaaatctaaatgtaatgtcagaacaatataaatctaggaatttccaatgttacatgaaacagagaagattttttacatattggtacatcaagctctacattcaagatatctttcgaataatgtatatattagcttaacttgcgagagggtaaaaccccaaagattcaataaagaaaccctaaattgaagcccaagaaattcaataacgataccctaaattgagacacgaaaaccttgaataaagcgaaatcaaaataaaaattgaggcataacaaagctatatatactagtgaataaagaatccctgcttcacattgaccaagaaaccacaaatttgaaacaaaaatcatgacgaagaggttagactttgaacttaatcatattcaaaacttacacttctactatacaaatgaaccataaactctacatcacactacatatctatagaagttccatcaaaccacaatgataccgctgctgcttccctccatctcttgctccttccatctctttacaagttctaatacacttgtgtcctccctgtcgttgtctacgatttcactaggcttccaagtgtcacagagtgaggtaagtgtagagacaacatacttcatctctggtctctgagtgagctccttggcgcagcagtgaattgctagtctcgctacgtcgtcaatgatgttgcggttctcttcattcacttaaattgtttcgtcaatggcttctctaaaagagtttttgtcgatgcagactctcctgaaccaactgagaatgtgatgttcagcatctgatcgcttcttgtctaaagcttccttgcttgtgactaactccatgagaataactccaaaactgtagacatcagcttttgtagttacccttccaatcaatgcacttacaaagtttaagctgttagataacaataacattggtgatccgatgtaataaacattaacagattagagaagaagcatacatgcgtattcaggtgccatgtaaccatatgtgccgaggatagactttgtcatgattgattcgttgccctctgctgtagatcgggtcaaaccaaaatctgaaaccctacaaaaaaacaaaaacttttaagagaaaaataacggtaatatcgattggactacttttttcgatcagcttttttgtaaaatttgaggatattaaatgatcgtatttaaaattattgtcaaaatacttagatttgttatttttgatccaaaaagttcaaaaatatatataaagcatgataataacgaaataataaacaatacatcctcaaaccaactattttaaaatgcatagagtttggaggaataaggagaaatcttgaaaatttatatatattttgcttgtagtttgcttttgtttttcttatgttttatcttctttttttgctttaaattaaacatgattaacaaactttatattttggtaattctagaacactataacatattaaaaaaattataaacaaaataattcttcatagacaatataaacctatgtaattatctctttgaaataaataaattaaatatgtttattaggaataagtcttagttggttttgcttaacatttaccaaatgtaaaaatattgtattcactctgggactaggccggttgatattagcgagacgtctaaaccacctcagatattttagagagttccttttaaacacttatctcttttacaattatctaatttttttactaaaataaaaatttaattgtataatcaaattatagtaaaatattaatattttttttatttgagaattttttggggttctctttgttggagatggtctaactacttcttcatgtcgtgtctaaaaagtaaaatggtatatatagccaaatccctattgcatttgaacttgataattgttgtgataaaattaaaaactagatcattgttcatataaagttacaacctttcaattcgtaattgttgaaaatgagagaatcgattggataatttgtaataagtgataactgagaagaggatcacacttgtcttcgttattgtattggcttgttggagataattagataggaattctatcataggataatgtttttaatcagcacgcaaaattgccttttatttgtcaccaaggtctctgacatgcatcagtacatcaatatccacatcctgaattttgatcgcaaaagagctcaagttctttttgcagcatgttaacgttccttcactggatatgcgttgttttgaactatgtagacaaattcaggaaagaaaaactgaaaatcttgtgctcaattgtgaagacttaagaggaagaagaaagtgacgaagatgatgtgttcattgccactttctcttcatcatcttccaagacgaacaacatctctgtattcctcctacacatgccatgaaccagaacaacgggcaaaccagccaaaaccccgatcacaataccgcgggatacatctgttagtagaaatataccgatcgtgaggaccaacaaaaccagcaccaaagtagaatcatcgatcacactgccaaatatcacccatggttcattatcacgggagtagacatatagccatgctactatcaagataacaaagacggaaaggtggacgggttgccaaagcatgctgatgaagatactaacaatgaagataacaatgtagttggttcgaaagatcatgatgttggatttgattcgttcagtggcaacgctaaaggagataggaaggctaaaggcactacattggacaagttcaagccatggcctttgagagctaagacctaacgagatcaattctttggctcgtcctaataagctcaggctcgacgaagcattttcttgggatggtatagtgccataggttgtcatattctttcacaagcaacaaacaaaaaaaaaaaggaaggaaagaaacagagtacgtccccagaggaatctatatggactaaagaatgtgaagcaacctaatttgaagagaaaaatctgtgttggctcaatgtttctgaggtagttagatcatctatcttatttgggaatgttttatttcaggacaccagaagagaggcagatacaagcagagatattcaaaggaatgaatggatacccttaaacttctcaaatcaaatccttatactataacgagactgtcattacatgtaatttctagaaaatagattcttaagagagtcattagactcgaaatacagacacaaacattctactgaaccaaaagaagttttttgatatacatatactagtgaaccagtataaatccatttatatctgcgtatcaaagtcggagatacatccttcaccatagtctctgatagcctaatcgttagcttcactggctgctagcatctgaagcaatagcctcaccacgataaactctccatggtcctcgatagaatactggcttcatcagaggcactgttttccctgggtgctcttcccaaaacttctcctgtttacagagagtggagtaacataaagttcacactcaaacaagaaacataactgatactaacacaaaacagtgtaagaaacacattgacaaagaatacaatatactacagaacaatgaattagattagatactaatcaagacgtaaaagcttcattgaaagacctaatgaaccattcccatgaaaagcaattcaagtatagttcttttcatgatcacacaatcctttattagtaatcaacaatgaatcatttccaattttatcacatttcgaaccctaacatttaccaatcacgagaatcaaattagaacccacaaatctaatagcaattccgggcctgaatcgataacaatacgaagctgaccttgtagagctgctctgtaactgcagcgccgatgacgccggtgtaaaaggcggcgacatagatagtaatcaaagttgtgaaggtttttggtcgacggtaaggttcgatcatttcccaaacagcaaatctctcgaacttattgtacttataatcagcatatttcctccatagttggctccacactccttgcatctctcagatttctctcttctcaaaccttcgccgaattttggatttctccgtctagctgtttcgcggcggcgcgtgggaacctgagaaaaatctgatatcaaaaggcaagactttaaacgttaaaacgtttaccaaacagtcctcttattcctacatgttttagttttcagcccttaacttatctttaacacttaaaagtcttgagctcacatttgtaaatttttaaaaaatcttatttgatatgattcttgtaaatttgtaaattgtaatcacaacacatgattattgtaaccattgtgctatgtatttgtttttcactatcgttcggtaagttgagaaagttataaatttaccccaaaactatggaaatgagacttatgcaacctcacatgacttcatcaataagcttgctttaaagcaataaagaacagcagtagtgaaaatacatttgcaattgactattagcagaagaatcgtaactggctttaggaagtattcttttacacccaaaaatatgacgatatacagaattttaagctgagtatttgcttgagcaaccaaagattgttgccttagtaatatatctaaaaatctggcacttcaacttgatgcagctggtttggctaatgttaagccttcaggtaccttggctggaccgaggctgcaacgatcggtattgtgcagttggattgcatcttttatcttctgaaactgaatacacacaaatattcaaaagaagaggatgtcaaatagtaatcagagacagaccaaatgcattcaaccggttttggtatcaatatcagcaaagggtctataatatttgatagatcctatcgaaaaagaacaacgaagtagttctctttgtttgaagcgttatgccaagctctagttgcggaaaaggtgaaaccgaaatagccttctttaccttagcaagagaacatgagaatgactcaagctgaccatcagctccacggtaaaagtggaaaaaaggaagcactctcacgttcaaactcttgcacatcggtttattctcatcaaagtttactttaaggaacactatatcgggatgttccaccgctgtcttgcaaagctgaaaacattttcaaaacagacacaaaaaaaacatctaaatttctcacagaatcacgaaagagaaatgaaactcttatagtttcatggaatagatacgtcacatgacactaacctttgggaacaatgctctgcaagaagcacaccaagttccataaaactctacaataactaatctttcacccgcaccgcttaaagcgctcaagaactcttcagtagaatgaatatcgaccatgtttggagcattcctctcccaccatttcggtggctctgtctcggctacattttcatctacctacaccacaaacccacatcagaaacataaaactatggccgaaagcatcaccatctaatcaaagcaatcaatagcatcaccgtctctaacaaaaaaactgaaactttagactaaattctaaacatctgaagtggaatgagaacataacagtgagctaaggtcacaattcacgtttaggctctagctagaggcgaaagaccaaatcgaataacaagagatcagaaatgggctcaagagtctcaatttccaaaagggtatacgatttacggacagaatcagctaaaaggcaagacatttgtaccttgacacgaaccacttggctcttgggtcgtctaagggggagatggcttccgagaccagaagatgggtggtaatgagaagacgagcaggaaggagaagatgagagaagacgcaatctcttgtcggaattcagattcgagtttggaggtaagcaaggttgcagaggattaagagcggtggcaaaggagctgaaggacgaggagacacgaatggcttgaaccgacgtcgtcgttaatcgcacaactccagccatctaaatgcacccagagagagagatagagactgagattgttcttggttttgaatcttctccgagagatcctctaaggagaagaagatcagaaactgtctggttcagattccagtgatatttctctcatcatgtctctccaattatacatagacgcgatttttcaacattaaatagcgtttaaaccgccatcatccacttggcgttttgtcgatatgatagttgaaaaagcgtaaacgcgtttttgtttctccgttagaatcgtgttttaacacggaacgcagataagtaatgcttttttctttacacacataacaaacttatttacttaaatgccatctatgtttatttgttatttggatcccaactttaattgatgtacaaacacagaaaaatctaaagaaaaatatcaaatttgaaggcgatttgggtttaattagattcgtatttttgatcaatcaagtctagcatatacttaggtttgataagttttctactttcgatcacgattttaaaagaggaaggttcttgttataaggatttaagtgaatctgttctgttccaataaactaagcaagtaatgaaagaaaaaacataacatgtgatgcaacaaaatcattgcaagaaaataggacacatcggtgataagtgttgataattccaacatacactaaattgtttccaattattggcaaagaatcgagtatccaattcaaagcattgtttctttgaaggaaagtacaaagcttccaatcttggcatcaaatgtcaagacaagtttcatactccgaaatactacaatacgttttagtgcaacttcgtgatgaaatcatacaaaaacagcaatcagatcaaaacgcataaaacgtctaagaggtcaaacgcgtttatgttttgacaacaaagtctcaagagtctagactgccttttattgacagaagaataaacttaccctactcttctacacgcgtggcaagagaatgcttgaagaaaactcatcagatccattgtttggtgctgccttaagtcctagaatcgaactgatcacattgtatatctgaacattctcaaaagaaggcactttccttccttttgagaacataggaccatgcccgatgaatatagttctcatcgaaaagaaggcattgtcatacccgtgagctccaccgcattccttggctttacttttcttctgctccaccttgaagccctcatcgactagtcctataataggcgggatgcggtcactgtctacataatgcagcctgctaggtaaatcctctttgagataaaccttcaagtacttcccattctctactttacccgagctcaaaccttcgtttatcttagccactatatccgctgcatcgtgccctgaagggggttgaatcgctagcaacggagtgtagtactgtacccaactgctagggattttgatccaaggagctaaatcatctaaaaccaccaattttttatcgcaagttccaaccattccatgatcaccaaccataatcatagtcacatcctcaaaaatccctcgtttttctaacccatcaattaatcttcctattaaccgatcaatgttaactacagcttctgtgatctgaggatcatcagggccaacttggtgaccttgatgatcaggatcttcaaagtaaagcgtcataaaactcgggatttcgttactaggcaaatcgaaatagctcaaaatagtatcaaccctatcatcaaaaggaacagagccattgtagttttgacataaaccttgaggacaattccaagagcctttgtgtacctcagagccaggccagaagtaagtagcagccttaagtccttggttcacaactgtctcccacaaaggctcacctaaccaccactctggttcatgactagccattgtgaaaacgttccctgtttctggatcaacaaagtggttattgatgattccatgataagctgggtatagacctgtgacgatagagtaatggttagggaaagttagtgtcggaaaaacagggattagaccagtctcagcttcggttccgttggctattaatctgtggatgctcggtagtttggtcttgaactggtacccgaaacgaaacccatctgatgaaatcaaaagaacaacaggcttgtcgagtttcttgagcggacgagctacggatctgtcgaaagctggtgactttgagatttggtttaaggaaaggacaggtttttgagaagagaagaagaggaaggcgaaagctgaagcggcggatagagcgatgcaggtgacgagaagtagagatgtgaagatgaagcagcttgagatgcttctagtggaagaatcagaaccggaggaatctgtgtgattgtcgagaagtgcgattgattggcttggtgggtcttggtcttcttcttgtggaactgatttaggttttttagctgataatgtgtcgccggagatcattgcttctcttctgatttaaacccaattggttgatgatgatgcttctctcaaaatctcagaaagttataaacttttatgtttagattaataattaatttaaaaagacacgatctcgtgagtttgcttagcttttagtacttggagtagttcgttggtagtgagtagtgacttccacattccgttttccatggatcgagatttttctaatggacgctcctgaatcagccacgtttccgggtaagaagtccatcattcttacattttcttcttttggttcgagtagcttcatagctaaagtgcgtagatggctaaagctaatagacttcttacttgatcagttacttctctttcaccattccatcaccttttttcctttttctttttagaattgggcttgcaaataaattttaaggaaaaaaaatattacaaaccagttttatgggcctagcccagtgaacatacttatcccacttactcttatggtcctagtctagtagtctttgtagacttgtaatatcaaagagacccggtttagtatcctcttcacacattctctcttattcatttcaattcttttagtgatggatggtctggcagattcattttggttcaggtaaatgcacgttgtgacttatgagaagcttttgttgttggttactattctttaattgaaaaaaacaaaaacaaaaaaggtataacaaaatactgataattaactttgaaaactggcagatcgaactataaaatataatttatttaaatgaaattgttatatatatatatacatatatatatatatgtatgtatatatcagtttgtattgtaattttataaaatcttttgctaacaatcttgattctcgaattcgacgtatgccacctcaataatacgtgattatcaatattaagtttattaactataacatcgataactacgaaattaaaatggatcattagattttaaattctgtgcgatatagtcacatgctaaagatcttcctaaatactagctagtgatatagaatcacagttttcacgttagtatatccagctaactttaattttgaaagttccaacgtatcaatagaaatattttcaagagttccactaattaagtcaggaaatggccaaatattgaaaaaattacatatccattgctataccataggatagagatcaataaatataaaaaagaggatagtgtatagagtatatatctcaaatagcaacgtattcagagacaataaagacagccaacttaaaaaaatatacaaaaaatcgtagagctacacattcattagttggtgtaaacctaaaatatatttttattaattcataattcagtatgttaattcaaataatttaggtctatttaagtatcttgcacattattcttatactaacaaaattattttcataacatattatttgttgatacaccattgatttagagctaaaagcctaaaacttcaaaatgcatccgaaagtaaacgccatactgcaacaaacttagattattgtttagcttcattctacttgtgatgtttctccaaatggcaagagaagactacgagtaaacaaagaagaaccgttgttcggagctggtcggagtccgagaatctctgcaacagcattatagacctgaacattctcgaacgatggcacttttattcctctcctaaaccttggaccatatccaacaaagattgatctcatagaaaagaacatattatcgtatccatgagttccagaacattcttgaacgtatgttctgttctgtttaaccattagaccttctcccaccattccgatgatcggtggaatccgagaactatcggaataatgcagcctttgcggtaaattctccttcaagtaaacctgcaaaaactctccgttggctactttccctgagctcaaagcttcgttcatcttccttacgagttctgcattcttctgtcctggattcttgacatctttgccccagcgcggattcatcgctagcaccggactataatcttggatccaatccgcgggtatcttgatccaatcggctaaatcatcaatgtaaatcactttcttgtcacagttagtaaccattccgtgatcaccaagcaatatcacatgaacatcactaaaaaccttcctcttctccaatcccatgatgatcctaccgatcattttatcgacctttgagacggcttccgtgacgcgaggatcatcagggccgtactcatggccttgtatgtccggttcatcgaaatacagagccatgaaatcagggatttctctctctggaagatcgaaatagttcaagatcgtatcgactctttcttctaaaggaactgaaacattgtaaggagctttacaaaagccttttgggcagttccaagaccctttgtggacgtcagcgcctggccaaaagtaagtcgcagccatgagcccttggttcactgcggtcacccacaacggctcacctaaccaccatttagggtttaggttcctgttgaatagttccccacttaccggatcggtaaatttgttcatgattatgccgtgggaagccggatagagtccggtagcgattgagtaatggtttgggaacgtcatggtggggaaaaccggaattaaaccggtcttagcttcggtacctctggatatgagcagatcgatgtttggtgtctctgtcttgaattggtaaccgaaccggaaaccatcgcaggaaattaacagaaccaccggtttgttgagcttcttggggggttggggtctcctgacgtaggaagatggggagtccgaaccattggcagtgacggctacggagaggacaatgagaacggttagagataacttgtacaatatgtaaccggaaaaaccggaccggccaggtttacttttcgtcattgagagagaaagttttgatggtgattggttgagctctagcaacgttcacattctttatagagcggcaaagttcttttttttttctctttatatatataacaagaatctctcgtgttttatttttgattaactaactaattcttcttctagtgttaagtggcaggtaatggtgggtgatataactttttgaagtgttgactgtcttgtcggcaagtaatagattctctaatctcaaatcaataaaagcatcgtatggttttaaatgctattatgataatagtattaacatatgaattaaatgactcatctactgaaaagttgttgagatttctgattttccccatgtttttcagaatcctttcacgtcctgatctttatttttaattaatacatagggatggccgaatatgatcggactcgagattcgtgacttcatcaacacaatggaaattggtgaaatgataaagaaaacggtgagtaatctatatattttaattggaatagatttctagccaaaatctaaaatttagtctccaagatctaaaaaatcaaatatacttaaaatactttccaatgataaaaaaaagaaaaaaatgtattaggaacaaagtatatgaaccaccatttgtttggtctctaaaacgtctcctttcaaatcaaaattacctcaaaagttgaagagatttatttggtaaaggaattaactacggaaaaaacaacccctctttctgttgatgcatgggtctgctcttttccaatcttatctcccaaaattaaacaagtccaagagttttctatatcgaacaattgacatatcgagggagagtgagaaagagagatcttcttacatcactattattgagtaactttaatgtaataaattaattcatatcaagtagatcatgatatgttgaataaacgttactatcaatataatatttactaaactggacttttatggattgagaggtacatgtgactgactgcaatatatatataagtagaaataattagttttgagtattgcatagtgtgtgatgtgacttactactaaacatcctacaaaaatgatattaattgaattattttaggaacaatttaggtaatgatttagatatatacattcgaataaaaaaagaaaagatgccgaattgttctattaacgtcgcttcagtccacgaaacctggttattcaaaaacattaagggtcacaagattgagcacatagattagtcactcattatcatcttacttattattcatgagctaagtgattttacttcattttacttcccttgttgctccagaaggcaagagaatgctccgagggaacaaagaagaaccattgttcggagctggtcggagtccaagaagctctgcaacgacgttatagatctgcacattctcgaatgatggcactttttttcctctactaaacctagaaccatgtccgacaaaaatagtcctcatcgagaagagctcgttgtcataaccatggtctccatagcaaacttgagcatttgttctgttctgtctgaccattagaccttctccgacaattcctatgatcggtggaatccgataactctctgaaaaatgcagtctctctggtagcttctccttcaagtaaactttcaaaaactctccgttttttactttccctgagctcaaagcttcgttcatcttcgccacgacttccgcgttcttttcgctttgattctcgacatctttcccccactgaggattgattgctagcactgggctgtaagcctggatccaagccgcgggtatcttgatccaatccgctaagtcatcaatgtaaatcgctttctcgttacactcacagttggtcaccattccgtgatcaccaagcaatatcacatgaacctcatcaaagatctccctctgcttcagcccctttatcaccctaccaatcattttatcaaccctagaaacagcagtcgtaacccgaggatcatcaggaccatagttatgacccgattggtctggctcatcgaaatacaacatcagtaaatcaggaacttcgtcctcaaggtgatcaaaatggctcaagaccgaatcaaccctttcttctaaaggaactgaaagattgaaatgtggacaatatccttcagggcaagtccaagaactttttagaacttcagagcctggccaaaagtaggtcacagccttgagaccttggtttactgcggttacccacagcggctcacctaaccaccattttggttgtaagcctttgttgaacacctctcccgtaaccggatcggtaaacttgttcatgattataccgtggtaagccgggtagagtccggttgcgatagagtagtggtttgggaatgtcatggtggggaaaaccgggattaaaccgtgtttggcctcagttcctccggatatgagaaggtcgatgtttggtgtgtccgttttaaattggtaaccaaaccggaaaccgtcgcaagagatcattaaaaccaccggtttgttgagcttcttgaaaggccagggacgcctggttttggacggccgagaatccaaacctttggtaccggcgttaacggccgctgcggctgcgatggtggctacgatgaaaatattaagaaggaagatgagagaaagtttgaaagaaataacatttttggttttagccatttgaaataaggtttgttatggttcttgcagctcatgttatttatagagcgtgagaatgtaatttctcccttttttaataacagaattagacttttattgaaattttgatgctgcatattgctcatgtaatgcatgggcgatcgatggtagttggtacataatagctagtgatatataaaatcagaattatttggggttttgtctttaattaaggaggatatttaattgcctgtctgtttagatttttttttttttttttgtatatattatagcttgggtgttgagttggtgttttgattgataaatcatcactactcactagtacaacaatttttagattacatcattaatatcacatagcaaaaattaatcagttattgaaataatggaaatgttattagtgatcatattattacaatgaagtacaaaaaattgattaaaaaaattaaagggacgttgacaaaagaaaatttaaatcggacatattgaggtatttgtcaaaaataaaatttggacatgaaagattacatttactactctatatatttgtgtcaaatgacaataaaaaaaatatcctccaacttttggaattttgactacttttctaaatcgttatggcagtttgtgaaaaataattatagattccttgaataagtacaatataagagttaggtagaagtcacgttcacattattgtcagctgcatgatccagatgcgggagagccgttgatatctgatcttacggtcttgatttaactcacgtgttttcacgttgagatatatccgatcctttcgtggtgactggatggcctgtgtttgacccttgtccctataaatgtaaaatacgcttatgccaactctatacggtttaaaagtgtttggggaccagccaataatagaatgtagccaaataagatggggcttttgtaagattggacacattttagcccaataattagaaaaaatgaattttttgaatggacttatggaaataagcatatattgataggggatatgacggttttaccccttgttagaggttatagtgttgataacaacaccatcgttgtcaacaattttttctgcaactcaaatcctcaatcccttctcactgccgcacttgcttcataagcaccatatttgtcaacaccatcacttttaagtccatcaaaaacactatctcttttgtttccaattttctccgtcaccaaaacgtcgtctcaaattaatccaatcaatcaagttaaacgatttgttatggaagaaatataaaccctaagaatactatctaagaaacccaagggttctactcttaaaaaagattcaaatcaattaatccccaattcatcactaattctaaaccaaaaaattgttcgttattgtcaacgtagttcaccgtcatcaccattgagagaagtattggaaaaatgaagaaaaattgcagaagggtgaaagcgtaacataaacagagagagaagtacctatttttataagcatatgagaagttacctaactagacaaaggcacagacttaattgtgctgatctcgtaattgatcccaaataagattgtattgtattagcctttgagttttgataagattttagataatatgacccagtggactttattttctagttgagtattgaatactgaatggtttttagttactacacatccatcatacaaatatgatattttgtaatatttaggaacaatttaggtaatgataaggtatatgcgtacgcgatcgaaaatataatgtcacatagaattatagaaaacatacactagctagtcactcactcgcatttatcaagctacttactatttctgagtctgagtgctctcttgagctataagagatttttggcttcattctaacccccttgttgctctgaaaggcaagagaatgctccgagggaacaaagaagaaccattgttcggagctggtcggagtccaagaatatctgcaacgacgctatagatctgcacattctcaaacgatggcactttctttcctctcctaaacctagaaccatgtccgacaaaaatagtcctcattgagaagaacttgttgtcataaccatggtctccgtagcattcttgagcattagttctattttgtctgacaattagaccttctccgaccattcctatgattggtggaatccgataactctgggaataatgcagtctgtccggtaacttctccttcaagtaaacagtcaaaaactctccgttttttactttccctgagctcaaagcttcgttcatctttgccaccacttcagcgttcttttcgccttgattctcgatgtttgttttgtttgttttgttttaaatctatggcagtttgtgaaaaatgttacagtagaaacagattcctttaataattataacactacaagagttgggtaaaattcatagtatcattattgtcatctgcatgatccagatgtatgagagctgttgatatctgatcttacggtcttgattttactcacgtaaattacctttgagataaaacatttcgtggtgggctcttcaacttcaacgactggctgatctgtcagttttgttatttttcaaaacgtgaagggaatctatgaataattccccgtgaataatatttacaactttgcagcgaggaacagtttcctataataagtacaatgccaaaactaggtaaaagcgtacaagacacaatatcaatttatcattatatttatgatatgactcaaccaaaacgaataatatgatcatgacccagacgtggtagaccgttgatatgatctgatcttactgacttgaaattgactcacgtgtttgttacatcgagatatatcctttcgtggtaaatatggccagtgttgatataagggcttataaagggaagtataagcccatgctaattttttggacaaaaagcacatgctaatttatttttggttagttttgaagttcttcgatcctatgggtctttgaaattactgggctctgaatgtagcccaaacaaaattttataagaaaactttctaaatttaattttgatagaaatattttttaatatattggtattttactatttttgttaattgacttttttttttccttgattccttctaagttctaactagtagtttacataacaagattgatggtacgtttatcgatttcatgacttgatttttatgatggaagatacttttcaactcgagttttttttatttccataaataaggcatgatcatgtgtcatagtcacacatatgatatcgacaaagataatgattatagtgagaaaattgtgatttgttggtaaatgatcgtgattttgttgtatgttacaatagttctaacaaatagattcacaaagtcacaatcatgaatcaaagaatagtttggatttcatgttcatctcatgattaagagtttaggaccataaatctatatactggtcaaatacataacataaatttgacttcatttgcttcatcttgttttctttgaattaccatggaatgaaaatgaaaagggaccatgtaaccaaattagaaaagtacagatccaataagatgttaaccagcaccaaccttttgaattttagcgaagggacagaaaaatgcaaagaagccatgtaaacttactcatttggccatctctgtgcatttcaatattggacactttgttttaatcatcactttggttcactttgagataacaaatcaaaagtctaggtacaaaaataaatgaccaaagacctattgctacctagattccttcttagcacattttattttccatacatcttatttttattagacatatctttttcttaaacaacttggggtgtgtataaaaagctataagcttccctatatatagtgtgttactttaattttgttagagaggtctacttttgtataacataataatcacaaaaagctttataaaggaacaacaaccaacataatttttttttatacctattagataatttacttaattcacatatcaacccaagtgcactatagctaataaaaaaatcaaaactgcaaaacgaaaaagaacacaaaaatgatcatgttaaggatgtacaaaaagataatgaattgtacattctcaaaccgtaagaaaaataatggaagcatcaggtaaatttttcaacttttttctcgcaataagaacattgcattaccaaaaaatagataagaacattattttaactcatacagagtaattcgtatgggctttggtttcattttgagatgattaaatccttttcataatatcaattttagtgatatatagtaaaaaggtgatgaaaatgataatcatggcagctttagaaaggattttgttagacagtaaacaatcgacagataagcaaagaagacacaaaagttactctgtgatgaatttatgggttgttgatttttttagaataattttccaaaacataaatgatttttcaattttattgattactaatgattaggaatttgtcatgatagatatttggaaaagaaacggaagagattcttcaggatctgatgttttcatttgtaattatttgaagatggagaaaaatatacattaggtgaaacatcttctttcactaaactatttttacgtccatcttctttcactaattagctcatatagatctatcttttttcaattctatttaacttttcttttcttcttccattaactcatgtgttgccaccaaattggtcaaaaagctcaggcaaatcttactgtgcatgtgaagtattattaaaaaaataaaaaattattctttcccaaatgattgttttatactaaaataaatttcttatttaattcggtaccataaaattagtttaacgatgaaaactacacttcatttgttggcagaggtaggtgtacttgtacgtagttgtatgaaacaaaagtttttaatcttagaaatttcagtattattgcacagtaagacactcatatcatagaaatcaactatgttcgaatatatccgatcatcatgcagtatgcatgcatgggtaaaccacgtgacgaagaatatatatatcgtgttttatgataatatataagtatacttttattgagtattaacactataagacatgtaatgtcataaataaatagtagtacagtaatttccttgaagaatattgtttttaaactgatcagttagcattaattaagggaacagcgtgattataaaagttgatatatcagccataacaagaggctaatatcttgcagacaatccgttcatggcatatgatccaaaggggatcatccataacatgaggcattaattaagtatattttatcacttgaattgtgacttcgagagatatatcgtctaaaccttcggttctcgtccaagcatatcttatttttgaatccggattattgtagtatgtatggaccatagtgtcatataatagcataaaagattttctatatagaccattataaataaaaaaaaagttttagtttaccagcaatcaaggctccatgagttatttcacacacttttaaaaagatttatttttatatatttttgaatataaaagtattgtcttctgttgtgattgggtattttctcatagaccaatgaaaaagaagtgtgatagacgcttaggggggcagcattcgattttcgattttattttagcgtttataatctgtttattctattatcactaatttggtaaaagacaacaagtgggacattcttgttgtctttgagaataaaaaagcaaatcaattcacaataatagagtggagtccaattgagtagctttctctttgatttgaccatacaaacaataaacatatatattggccccaaaacatcagaaaatatgtaaaaaaaaggtgtaaattggatatcgtaaaaataggatttagatttctgaatatgctgagtttctagtaaaactaaacgaatatagattatttttaaactatatatatttgttaatatttatatatatattgaaaagtagaaaaatgtaaactatactaaaaatactaatatttatatttttcaatgacacaataaatactgtgaaaataaataaatttacaaataatgatatttaccttgttagtgttgagaccataatttaagtcattccactatgttttcaatcatgacaataatattacaagttctcatattccgatattaatctaaatgattcaaatgaaattgcaaaattatttatataaagtttagggattaaattcatatgtcaatagttattttagttcttcaaccataaaaatgtatcaaacaaagatccatatataaatccaaagtttgcatttatactataacataggtaatatgtgcacctatactataaatgaaagtttgcatttcattatttactttatttcgtttgattaaaaaaaagagatgaaaatatcattttgccgtattctatcaaaaacaatgtagctacccaaaagatgttaaaaacatcttctttatgagttttcgggacacaacttaatatttttttttttttttggcagtttttaagatattataaaaatatgtgatattataaatcaacacaacatgtcccctattaaataaaagtcagatatatatactattctatacaaattaaatcccacttgagtagatgatatttgctataacatatgttttttttgtcttctttttctaaattggatactctttttactaaattggacacaacatgtcacaaccaagatccagatatgttatgcgagtgtttacggaacaacttgcagatatgcttagtgtttttccaatggaactcggatttaatagctttttgaatgaaataaattatatgaattccatgaaatgcaatttttttttttttaggatttgggtagacgatatttacaactacaacatacttgtaattattatgatgatataataaaatcagattataagatgcatggaataattgaaattaaagatatacggatagaaagcaaattggtgaaataaaaccctaccacgaccacttgtttattacacattgtacataactgttgaatcaaatcaattgatttgggaaccattgtgaagatgatcatgaccattcatctatctctatattttattagattttattttcaatatatgttgatactctttcgtaggaccatgatgcatactgctgcatatatgataatactgtatatttgagcataaagacagttaataatcctagtgtaaaatagaagaccagaccagaaacaccactttctcaatggtatcatatgttacacattttatcactcaaatctgtttatgaatcttatgatagactcaattatttcaacagatttatggtggtagtacaatggctattgatgattcgacatatgtaaataggttatagtgagagtcttgtggttttaacttgtgcattgtaaacgttttaagtggcaaattttatagatgtcggagattaagatgtgtttcgatcttggattcataaatttacataagaagaaaaacatgaagttatatataagatttgatacataaaaaggcaaagtataaatgctaatatatggctttgcaagctggaaactaggcgggttcggcggatcctgtccatgaaagctcaccacacaaaattaaaatttaggaatcccttagggttgtttgtatatatataggtagggagcatcctaagctttttcttttgttcctttcctcttccaatttccaactattttcttataagaaaatctgcttttgttttatagtctagaatatcattttgactttaattttctttcttttttaatgaaaattttcgattctagtcatattcatccaattcattcttttggtttttgtaaagttgaaaggatttaattagtaaacttcatctatatttcttataaagattttccacatttattttgataatgtgacacattaaattattaaagaaataaagagaaaaaaatagtactagggactaaaagtgactagtgagggaacaaacaaagatgtaaattccattatacatctttatatcttgctttctttataactttcctttttgattatttaatatcctttgtcccctgaaactcatcgacgaagaaattcagaacacttgcttttttagattggaaagtggttgtgaatttgtagttaagaaaaagtaaaaaacagtaaaaaaaaaattgaagttaaacaattaaaaaatcttacaaaactaattatgcttctctaaacacattaccccaaaaaaaaaaaacagaacatattttaaaaattaacactcaaaaattacatttgtaatgcttgagaagcctattggcttcccttaaaccactatagtaggcaccatgagttgtggagtaatgggttctatgtgttgcttcccctgcaaacatgacttgaagctcatgaaccttggcttgatcatgaccattgacctgaccaaccttcttattaatctttggcaatggctcagccattgcgtctaggtcatccccgcttgatccaaccgctacatacgaataggagcctctgaacagaggatcacttccccatttgctcttcaagacctttgtaatcttcatggcttcatcatcatcattcaatgagccattggtcaagggctttgcggtatcattcttaacttccttgcctgtcaagcaagagatagtggtcatgacagcgtctttgatctcctcatcggtaagtttctcaagctcgagagcttctttgcctgcaaaccaagaaagcaagacctttgaattgctatggattggggtaatggtcgcggttcttctcatccaccatggaattttcacgaacctaaactcggaatcctcccggtcaaacacaagctgcaaagaggggaactttctttgagacatctcgacgaacagcttgttgacaactccatagcctagtcttctaatagcgtctgatttgaaatcaggcaaaggaggactaaacaattcagcatcagtctcaatccctgctttaagcacacctaaagagacagtaacaataacatgatctgcaaaaacaacagacccatctgagaaatgcagcttcacttcattactctgccactcgatcttcgtgacctttcgattcaattggataacaccttgaggaagcacagatgccaaatgatgaataacactaagatagcctttagctatagtgatttcttctcctggaaacatctgatactcactctccgccgcgaaatcaagcgtcgagagttcatcagcagatgtgtaagtcctctgtgtgttactaaacatcgtaaaaatggcttcttcaagtgacttcctactccatttcccataccctttaactccttcttctcctccattgctgattgaatcccaataagcatcaaacccagatttcaaaaacgacccaacactagtactacttcccttagagcaaaccctagtggcagtttcgtaaatatgagccaaacgactcaaatcggcgtcggattgagagatctctttcccctgagctaattccatgagagcagtgaacaaaccagagatggattcaacaatggaaggctcaatctcgaacccaccttcagcaaaggtcttagctttatcaatggtggaatccatacactcccatggctcatcagagactaaagaaccagtctctttagcgattctataaacagggcttccaccgattccgtggatccacgtggcacccatctcaatcttctctgatgagaactcagaggtattgatcctaccgccgattctagaaccgccttcgacgactgagagctcgaaggtgttgttggagcttgtgtagagcttgttcgccgccgtgagaccagccattccagctccgattataacaattcttgctttcttcgccatagttaaaggaatctccttgtcggtgttgtgttatatgcttcgatgaaaaaaggagagatttttatctgtgtgttttggggattaggggaaggggacggaggaaggtgaatgaatggagagagattgctttggctcaacatttataagggagagtctgtgtgtgtgtgtgtgtgagccttaagcgtgtggagagattttagttacaatcatcggttaagtttaggtttttgatctattaatttttagttaatcatgaattagtgattgacagtgtcataattaattattataatacttcaaagttaggttaattatctctacaaagtactgtgttttcaacatcctctaaatgctgtttaaagaaatcaatcaaattattagcatcagtatcacacaacacacatgtccaaaaatgtgtacatgtcaattagatttcgagtcacctcaagccaaacctatcctctcactgactaattgatttattgtaagagaaaaaaaaatgtatatatatatatatatatatatttgttttaatttcacttgtatttgaataaaaatgacacacttgtataagtgagcacaaaacaaataacagaaaaacttttggatcgttagaggcggttgaactgcctcaaacgcttttttagtgaaaaagcaatgtgatgaaaagatgtgcatgttgtgcaacatgctccaaacgtaccaacaacgtgtcgctatttataccttatgtgtttacattattacaatttgaatggttatgatctatgataataaataatagtaatagtatcatgcttataagacactaaaactaattgcaagaatctggataaccaataacaatggtagttgacaggagttggatatcccttggttaaaggtaaattggatcctttgttattttacctttggattattaaaaaaaaaaaaggaacgtaaattggatcctttgtaattttatttccttatgtaagtatgaaagtgatcgaactaatactctgaaaattcaatgtacgtattacgtataacttgacataacacatccatttcatcttatgggcaaagtatataaaaaattatgttaacgaattaattagacaaatgaaagtgagtaaaactaatagaaagaaattataaattttggagagctagagagagtccgagagagggagatcacatgtaagaaagaagatgacagaagaaggcccacaagatgcaaattatgagtcagtggtactgatccctttgattggatacctattttcatcaatctaaccatgattgtgtcatcactctaacttccatatatcttttataattatattgctcatttttaatttacatatatcggtatatgcatgcaaaaccgaattactcagattctaagaaatatatatcagtaaaacctatcatttatatagacttacatgtaataaatataatccatatatgatttaaacatgtaataaacatatattgtggaaccaaaaagatacattgatatgtataatcaacgttgaaggacaacgatgaagatattataaactcgttcatatatatgatatttttttgttaaagtttaaaatatattcgtcgaagaagtattgttcgcatgatttgtttttgggtcaaaacactattgtttgaaagttgtagcttttaagatattcaatctacgtgataatatattttatttaagacaaaacatatttatatagtggataatataaagacgctaaatatgtttccttttgcttttttacccttagcatttgtaggcaatcatcataacacaccaatacgctatgatcaattaattccttaagctagcgaaaatgttcatgaagaaatgattttcctttttcatcgatcaaagtacgcaactttttcttttgatgaagatattatcgtagattatcttactttagttaaaattaaattatatcaaacttttgcactatacacagaaatggatcttcatcaaaggtagtgcagatccgtaagctatcatatcgttaacttataaaattcagaaaatgacccattattagaaaatatatattttggatcaagacttaattgatatctatggttactcataaaaatattgaaataatccatatatgcattccttctacgtaaaatccacaataacattttttttctctgtgacacaacatttattaactctttttttttttaggcaaaaaacatttattaactcaaaatgtgaaaaaacaagaataaaagcaaagcataaagacaaaatctgtgcgaaggcttttgtcggttgcgatgagtttgcacatcccgaagaagctctggctctcggcgaagagaatcaactttgagttcgtaaacaaatacatctaaattttattattattttctcaagctgtgtgtgttatctctatgtactttgatgtacacaaaatcataatatagtataaaataggatataatattaacatgagttgcttcttccgatatattcgataaattggaacaacaacactaaataatatacaagagcaacctccaccattatttttggacataactatatcaagttcaaatagaagaaaaacgattttcacagtatgtgtaatataccacagttgatcaatcttattttttttgtaagatagagaatctacatgccaaaagattatagagatataaatacgaaacggagaggtttgacgttgcaactatatatatgcatatacatagtctgtgtagataggtagaaggaaagtcaaaatctcgagctccaaaaatctagctactatggtatttcccgtgaccctaaggacttttccttgatcttcgaagcttgaaaatgacacactcgcaggttattacgtgtttcatactcatatagttaatatgcaaactatagatgcgttgtatccatttatagatcataacaagagtagtactgcttaaaagctttgcactctagacaaactttaggcttaaaattggttcaccacacacacatcgttctcaagtaacaatagtactaatttggtgagccaaaatgctataatgaaatgaggtaaatgatccatctggattactttgtaaggaacaccaatgatcggcttgaatggtgtagcatcactacaacaatttcgatagggggcaatagagaggcagaccagaaaaggggtttaatggctaggatttttaaaaggactaaatcttgaacaatgaagatatagtactccttgagccacaaatttgtctccccacttccaaacaaatagtttggcatattcacatacacatacaatgatacaaaactcaaaacgtgtgtttatgtatatatgtgtgtgtttgtatgcgtcgacaaagaaggttttgtttggttatagctgcaatgaatcaatgatgagaatccaacaaaacctagagaagcccctatgagatggtcttatatctataaatgagtagtgtacttaatgtcagataaatcaaaaccccatgaaaggcttagtacctagatgtttttaactagagagagagagagagagagagagagagagagagagagagagagagagagagagagaatctactagaagatattatgcaataaatttcctcaaatgttgctacctaactccctcaccccacaatcccaagagtattaagttcaattgtctgcaagtttgtatagatgtcaggtcttaagattgcacaaatcctttgtagatctaatgagttgatccggttcaacccggtttacgcagaaccaatcttgcttgaaatgaaaccgaatagaggtgaagagcgacgattttctatctgcttttgttgttggaagtagaactgaacggttcagggacacatgagtcaaatgtcaagcacttgagatttggatttcactgattcaatctgttgttttagtttggtcttgcttaaccaagtttggattcacaaaaaaaaaagttgaaaatacaagcaagttaggtgcctaggattaacctgaagaaacaggatcaagtaccatacaagattccggaagtcctaaatctaccaatatgttgaattactggcctacataaaccaagtaatattccgcaaaaataacacctaaatcgcataagtaaactgattttcctcgcaaaaactgacactaaaccccagcaacttactaatactaatagacatgatgggattgcttcctcaagacttggaggtacatgtgaaaacatgtgacttgaatttctctagctctgtcaggacttcatcttccggtctgtaaatcaagtcactcatccgccatatctgcattaatttacaaatcaaaagttttcatttttaccgagaaagttaatcataggtaggttccagagtaaatgtagcaagacatttaaaagtacctgcaatgtaccacctccaccgatactctcacaattatcagaaacactgacaatagtccaagggttcaataggctccagtggaagtcgaccactttgtccctaagaagatatacacgaggaaattatagattccactgaagagagtaaaagggaaaggcaagcaagtgaattagaattaagtcttgagaacctgtgaccagcatgctggaagaaaagcccatcaggagttttggttgcacgctcagacttcttgccaacctggtgcacacatatatgttaatatggtgagcttgaaagtaagagaatagttttaaatgtgaatgtgagaaattgtactaaccctatcacaatcccatatgttcaagagaccatcttctgcagaactcccaaaaacagatgatttatcaggagaccactgaattgataacgaagcaatgtcattggggataggtttacaggacaaataatatgaaaagaaaaaaacaaaaaaaaaaaacagaggtggtggcatgttgttgaaacctgaacacaaagaacagcagctctgtggccttcaaatttgtaaacaggtgaaccaactccatttgaggtaaggtttcggcggtcaaacacacggacagtgttatctgctgacctggaaaagtgatgtagaagcgtagagtgagaggacgagtagcatctctgtacttttggacaagtatttaagtttgtgaaatcagtacccagtcaggatcagattattgtcatgaggattccaatcgacacagtgaagatcagcatcatgtgccttctcaacctgccagcgcacaagaagaaacagacggaatctgaaacaagaccaaaaagttaaacctcaaatgtcgatctggctaaaaaaaagaggtaccttcatggcaggactagtgccagttcttgcgtcccatagcataaggcaagaatcgtcaccaacactgcagaattcttgtgcactgtaggacaaaacaaaaaattaccaatttttttataccaaaagcatcagaaaattctgagtaggtctgcatttgggtgtaaacttaagagcttattaaaaaaggagactgtcccaagaagttacctagatggacagaatgccacgtcttcaacagtatctttgtggccattatatatgcctcgagggccaacagaaggaccaccagttttatcactaccttcaccagtctgcttgaagctggatccaggggatttggaatccgaaccagccattgtgatatggtcttggatattccacaaaataacggacttgtccttgcctgcacggaagaatctttgatgagaaacttgcaaaccacaagatatgacacaaaaatagaactgatacaaacctccagagagaacaaaaggttcggttgggcacattgcaagagcaaattcagcatcatcctggtgcccaattagtaactgaaaataaaagttgttcaaatgatgcaaaaagagtagctctttcgattgttaatatgatgcacaagcaggttgtttaactcagtgagacaacataacgaaaattctcacaagagcataccaaatctggacgagaatctggagctccaagcacagcataccggtctggttgagtctcagtgttccaaatgagaatctgaaaaccaatatatcatacttgcatgactgaaactggaactattcaaaaacaaggatactgaataacgaaagccttttttttgtcacgctgatgacccgagaaagcagaacttacatcaggactgtcggtgtgagtagctacaatcttgctattttgagggagttccctaattctgttgacctgcgatgaatgaagggtacacaaaacaaaatctttttcagcactcaagtcctaaacgaaatgcagattcagtaaatccatctaagaaaaaacaatgagaatacaggaatatcacacctctccagggtggatgatggtcttgtacttcttcacaaatggagagtgtgccttttcattaagctgaaagcatataaagaaacggtatttcaataatttcatctcagcagagagtaacacaaggacaaaagcacaagctttggtagagaaaaactaattacctgcctattaacagtttcgcaattggctatgaccaaagtattaggcacactgccattcgtctaatgacagaaccaagaaaaaacggtaaacataaggagcagtaaacaaactttggatatttttcatcaagaaaaaatgtacaaaccacaagaacaagagcaaactcacttgttccgagagatagagacgttgagtcttagaacctgcttgctcaagctgtggcccccatctgctcaaatcaaacaacaggattacaacgaaatcgtacctctttacacaaaagctaaacacttcactaaatcgtagcacagctaaacatctgaaaccaaaaagtaacaaaacagaacacctaaaccgagttggtcaagtgttatcaacgacatcattttcctaccaaaacaagttccagaggttcaaaaatggaaacatcagatagctaatgagctaaaagcctaaaagagaaagaaacacagaaaagcatggagactgagctaaattaaaaacccgaactagaacatgtcctaatctcacaaattccagaaaccagctaagaaaaactctcaatctatgagtatttcactagctgaaacggaaatgtaactcaatcgcctgaccaaaagcacaaagctagaatttttatttcccaaaaaagaaccaactttctccaaaaccaaagatcgaaaaccctagaaacagaaaacctataaaaaaaaacacagacctgcaagagagagagggccagacgagggtatgattaacaaacgaatcatagagaatgggaagaagagtcttccactgagagtaagtgtcgtcaacggtggccttttgactctgctgtagcaaaaatggtaactgagactcgttgttgctcttaggtttccgtcttctcttatccgtcaaaatggctgtcaccggagtcctaggtgctcttctcggcctggtggcttgaacagtcgctgctgcttcgctttccatttccttcttttctctcgttttctctctactctcctttgttttttttataatattattatttatgccacgtggagtaaacttcgtcccggcaaatacccaataggcaaatacttaaattagcgaattaaaatgatttcttcacactaaagagtataatcagtatcttcccattacaaaatttgagtaaagctttcttctaaatcttggtagaaagttactaactgatcaacttaacaacgcaaacgctgttctaaaggcggtgaaaattgaaaccaaaactcggtttagcgttcaaaagaagaagataatttaattgtaacttggtgtttaaaggctacttctcaagtcttaacattcataactctgattttacttgaacaaagataaatctgttttttttgtctttgaactagttgggaatagtattgaggaagaaggatcagacataaacaccactagcaagtagcaaaaacaacgatccaaaaccctgcaaataacacagaaacagattttaaccaaacattagatttaaagaaaactcttaaacttaagtcaagagggtgaagaagaaaatccataccaagaagacagatgcaactgctgaagtagcgagctcctttccgacgcttcggtttttcctggatgatgtagcttcatagctgcaacacaaatgttatgacagggtaagttttgatcactccttgttgggctgaatgaatctaaaccagcacaatgaataccaaaagagtccaatatgaccttattacaaagaagctaaaatgaatggttcaagtctatcttaaagttttgactcgaggctaacccacatgctctcgtagcccagacgcacattactttaacaaaccgaatcatatctcctaaaacttgccaccctttgaaaggtaaatgctccacgcttaaatgaaaatcatacaaatctaactttcttgtatcttaactaaatcgataatcagtcattttgtcatattcagtgaaactattagagtactgattccatttccatagactatcaccttatcattgataaattttgagtctttatatcatgatagtatatagagctcacacatttccaaaaggttactagatgagtcccatgactttcttactttttacccagaaactttagtaataagaaaggcacatatttcaacagattaatctagcaaagagatcatgaaagtgatgaacatgtagcttcaggagctttagaagacctatctctagagaatagcaattgagaaagcattgtgaccaaaccatatatataagcagtaacaatgttggtcaagcttcatacacagtgaacaaacaagaggagagcctcacacgattcatagttcagaacctagtcatgactatcacacactaatcaagctttatgaaaatcaagataaatcataggtagatcgaatctatcaggaactgtttcactaatctgacatcaagtaatataaattgagaacaagaaggggcaatttcgaagatctagagatcagatcaattattagcttacatgaagaagatagcggtaatgacgagaccaatcgcaagagtgaacaccgataaagtcggatacagcgccaccggaatcggactcgcaatcggtttcgccgccttctcaccgggaacgagcacaaacacaccaaacaaaatcagaaatcgtaaaagcaacaaatagagagatcaaattagctgtgactgaaagcacttggacggatctagatttaccattgttgctaagctcttcttcttcttcttcgatctgaggaacaatgaaaaagctatttgactgatctcgctcgcttgatcgcttcactaaacaaacacgagtcgcttccggtttgtacttaaccggcttgttataacacaaccacggttattttatgggccagtttttctgtttaaaggttcgatttaataggcccaaatatacttattaaggcctttgatataaaatgtgttcatatctttatcttcttttaacgttgtataactttattcaaagtgcaatgtgatcctttaccattttcgaaaattgaaatccacttcaatgtagacatctccaactccttgtcaatcaatttccggattgaagattgggtactctctctagatttagttcccacctgaaaatatgggaccggatgtaatagtaacagatttttgtattggtcaacaatgacttatagatttcgtttttttcatggaaaggacttagaaattggttagggtttaatttgttgaccaatacgaaaatatggtcccaaagaagtgttgccatactaaatgacgaaaaccggctgccgaatatttctataggtaggacatagaacttacatcaatttgcgaccacatatattggaggtagcattttaatcgtctctagacttaaagggctatagcagatagaggagacggtttactcactcgtttgctatttgcagatatttacgaattttggcacatggatccaagaaaacaattctgcctgttgtgtgtggatagattttatgcagaaaaaaagtactagtccatcacatttactttaaaaattaaatcaacggcctagtatttttgttcgattataacaaaactattataaaaaaaaaaatgtacttatatttaacactattgattaattaataaatgaatcttccgactgttttctttgtagggcgtgatgtaatcacgggacggtgagtcggtgatatcattcgtgtgcttcactctctaaacatatagcgaagtaaattgacaaaaaaaaaaaaaacaaatagttaaccgtcgacaattcaataatggatagagtttgtgattaaatcatctataacatatatatatatatatatatatattaattaaatgtttgtctcactttgcatgtgatacgaaatgaagaaactacaaaaaagtgaagttcgaggtggaataagccttttgctttctcacgccacactaaaacttgcgtatgtgtttcgattctgcgccggtcctgttgattatagaacatgtaatttaataggagaaagtaactgttagtatagtattaaaaacgaatgtatataattttactattataggtatgatcgacttttgtactataaatttcaataacattccttcaatgaaaaaaaaaagaaagagttatattgtaatagactatagttttgtgagagagtttcaagtaacgtttgcaattggacgaacttttaaagaatattaactgcaaaaacactacttgggtgtagaaaagtgttatttatgaaccggcccacagagtcggagtttggtcggttccacaaatttcaaatttacgttgtgatctacatacaataaattatcacatcttataaagtcaaatgaaactacctcaactatactagaaaatattgaatactaaattataaaatacagaattagaaacttatcaggggtgttaaaatcaatttacccagtagactttttattattgttgaactacgtttaaacaacatatagatatttcgaagtcaatgcagtcaaatatttcatacaaaacactttcgacgaacacaacttgtatctttttttctctttggtgtcaacaagacttgtatatatatcaacatcaatgaaaatacgcaaagatatatatgttcacgtgacaatttattacattaaattgtatatagtctctctatggttctatataatctcatactttctacctcatctctatagtaatcccataatcaacaagacactctaatagtaatatctcaacctccgtctcgttttcccattaacctacccgtttgttagattatgactaatactctctgtttaagcctcatcaccctaataacgctttttataagtttaaccccaaccttaatcaaatcagatgagggcattgatgttttcttacccatatcactcaaccttacggtcctaaccgatcccttctccatctctgccgcttctcacgacttcggtaacataaccgacgaaaatcccggcgccgtcctctgcccttcctccaccacggaggtggctcgtctcctccgtttcgctaacggaggattctcttacaataaaggctcaaccagccccgcgtctactttcaaagtggctgctcgaggccaaggccactccctccgtggccaagcctctgcacccggaggtgtcgtcgtgaacatgacgtgtctcgccatggcggctaaaccagcggcggttgttatctcggcagacgggacttacgctgacgtggctgccgggacgatgtgggtggatgttctgaaggcggcggtggatagaggcgtctcgccggttacatggacggattatttgtatctcagcgtcggcgggacgttgtcgaacgctggaatcggtggtcagacgtttagacacggccctcagattagtaacgttcatgagcttgacgttattaccggtacgtaaataccaaaacttcactaatctcgttacaattttttaattttttggtaatataaattttgtacggctcaactcttaattaagaatgaaacagtatctatgatcttctagatgctctttttttgtctgcaagctttaattgtagtaacatcagcgatatatatatcacatgcatgtgtattattgatgataatatataatgttttagttacaaatttgattctcaaggtaaaactcacacgccataaccagtataaaactccaaaaatcacgttttggtcagaaatacatatccttcattaacagtagttatgctataatttgtgattataaataactccggagtttgttcacaatactaaatttcaggaaaaggtgaaatgatgacttgctctccaaagttaaaccctgaattgttctatggagttttaggaggtttgggtcaattcggtattataacgagggccaggattgcgttggatcatgcacccacaagggtatgtatcatgcatctatagtgtaatcaatttataattttaatgtagtggtcctaaatccaaaatttgatttgatttggttggaacgtacgtatatataataagtcaaaaggctgattttgaagacgaatttatatacttttgttgaattaaatctgattttgcttacgttttattagattctgcgtaataaatcctaggacttgctcgagtgtaatcttgtcttatgcttgcaaatcttgttgatgtcaatatctaatcttttttattatatttccctacgtaagttttagatatagttattttaaactgctataaattgtgtacgtatagactttagataaaaagttgtggtcgcttgcacctatttgtttatcgctatagtgattcaaaggtctatatatgattcttggtttttctttttgaaaaaaatagaccatacaatccaaggaagatgatcttaaatggactaatttatggatataaattgatatacaaatctgcaggtgaaatggtctcgcatactctacagtgacttctcggcttttaaaagagaccaagagcgtttaatatcaatgaccaatgatctcggagttgactttttggaaggtcaacttatgatgtcaaatggcttcgtagacacctctttcttcccactctccgatcaaacaagagtcgcatctcttgtgaatgaccaccggatcatctatgttctcgaagtagccaagtattatgacagaaccacccttcccattattgaccaggtactaaaatccattattcatgatgattatcttcacacaatcagtatcatcaccaattaccatcatcacttgtcatatatgatccaaagtaaatatatcacatgatataaataaatcgttcaaatctttttttttaaagaataaaagaatcattttcaagcattactcatacacatctacgaatcaccgtgaccatatataaccatacgcttattaaataatcatttttgtttgtaggtgattgacacgttaagtagaactctaggtttcgctccagggtttatgttcgtacaagatgttccgtatttcgatttcttgaaccgtgtccgaaacgaagaagataaactcagatctttaggactatgggaagttcctcatccatggcttaacatctttgtcccggggtctcgaatccaagattttcatgatggtgttattaatggccttcttctaaaccaaacctcaacttctggtgttactctcttctatcccacaaaccgaaacaagtaaatatttactttttgattttgttttatttgaaagtatatcccaataatgtatgttaaattgttaacaagaatttattttattaatagatggaacaaccgcatgtcaacgatgacaccggacgaagatgttttttatgtgatcggattactgcaatcagctggtggatctcaaaattggcaagaacttgaaaatctcaacgacaaggttattcagttttgtgaaaactcgggaattaagattaaggaatatttgatgcactatacaagaaaagaagattgggttaaacattttggaccaaaatgggatgattttttaagaaagaaaattatgtttgatcccaaaagactattgtctccaggacaagacatatttaattaacttatcacatgtcttaattaatttgttatgtaactttagaacgtatttttataacatatacagacaagtacgttcatcgtctaactaacaaatattatagtttagtgatttggttaggctacttacgttaatctttttcgttcttgtatgaaatatattgtataagtcaaaagacaaagaaaaatatattattatagcggtataggtctctcagaaattaagaaccaattatttcttttattaagaacttttatgtggttaaaaattactaagaagtatacaaaattttctaaatttgaaagtaaattaagaacctgttttattaagaaaaatttcgataatatctgtcaaaaaaaacaattcccataactttttaactattttcctttttacaaaatcttctcaaaaaaactgtgacagactaatttatgaaacgacatacatgttgaaatgctaaattgaaaacggtgtgttatttggaaattcaaaacgttttcgtttagaattagtacaaagttctcttcattggccaaaaattcaaaacgctgtcgcttttaaattagtacaaagttctcgtccttagccaaatgcatctatggcgctttgtcaattcccactgaatcttcacactatctcctcatcaacatcttcatctcctcgattccgtcgtcttcaacctctagatacctctacaaagcccaattttcttattcgtagactcagatttcatagcttcaatcacccagttcggtttcacacccgagaattgagtgtcatcacagccaccattgacatcgacactcaccagaggaagaagacgaagagaaaacctaaaccaggttttttcgaagaaattagtgataaatggtcttcacgtatcagccccaaaaccgagaaattgccatggcagaagcaagaagagcaaattcaacatcacgaagacgaagaagatgaggaaggagatgaatcaagttcaaatctttcttctgggaatggtttatctgataagagaaccgattccaatcgtctctattcggcgaatgagccgtggagtttcccaagaccaagcggatacatgtctgctccatgggttaacaatggtgggtctaaaggtgttaactttacgactagctccgagcaaggaattcaaagttcgagttttcacgatgttactactgtagatagatatagaagggataacgattctagcgatagagctgtagattcagatttagatgatggtgaaagagggatgatagattcagggaataataagggaatatggagaacgaggaagagtaatacagtagaagctgagaggattgtaccagaacatgagctgaaaaggttgaggaatgtagctttgagaatggttgagagagtaaaagtaggttctgcaggaattacgcaggcgcttgttgaagctattcatgagaaatgggaggttgatgaagttgtgaagttgaaatttagtgagccttattctcttaatatgaagagaactcatgaagttttggaggttagatttgaatctatcaataaaaggaatgagcttttggttgaattctcaataatgtgtttgcttattttgttgtttgtggtgtttaacagaagaaaactgggggattagtgatatggaggtcaggaagctcggttgtgttatacagaggaataagttataagctcaagtgtgttcaaacatttattaaacagaacaatctcgaggcaaaccctgagatccatcgaagtgtagaggcaagggattacgtacaagaggatgggaattacccgaagaatgtacctaaagaacaattatccgagctatgtgaactgaatgatttgctggacgaggttggtccaaggtttcatgattggacagggtgtgctccgtttcctgttgatgcagacttgcttcctggatacgttgaaggatataggtgtccgtttaggattcttccgcaaggagtaaaaccttgtttgtctaacacggaaatgacagaaatgcgtcggcttgctaggacaagccctccacattttgctctgggtacgcataaaatcattgaatcttgctttcttttagtagtagtaatatatggttttccaagtgactgtttgtttcttcatttatctggtttagggaggagcagagagttacaaggtctggctaaggcaatggtaaagctatgggcaaaaagtgcgatcgccaaaatagcaatcaaacgcggtgtagaaaatacgcggaatgagagaatggcagaagaacttaaggtttgatgaaaacataaacttccatacatattcaaactcaccaatattttgcatgtgctcactttgtttatcttattcattcttgaagagacttacccgcggtgtacttgtttcgagaaacaaggagtatattgtcttctacagaggtaatgacttcatgcctcctgcagtggcagaggcattgaccgagaggcaaaaggagataacagaagttcttcaagccaaggaggatcaagcccgggaaatggcttcaacaagagccacactcacatcacaagccaaatcgcctaaaacccaattactcgctggaactcttgctgagactatagctgcaagttctcggtgggcaccaaatgcaagcagcgttgatattgaggagttaaagagagaatcagcttccatcaaaagagctgcattgattagagatctcgagctaaggcttctttatgtgagtatcaccctttttttcttttggtatctgattgcacaattttctgtgcctaaaatttgatgatctcttttgtttcagggaaagcaaaagttgagaagagctgagagagatttagctaaagtgcagaaggatcttgacccatcggaactcccaactgattcagaaataatcacagaagaagagagacttctttaccgcaaaattggtttgagtatggatccgtttcttctcttaggtaagcacaaagactgttctcactcatgtgtcacgcttaaagccaaaacgatgtgtaataagaatttgttttcctgttcttaaaacgttatacaggaagacgagaggtgtatgatggtaccatagagaacatgcatttacactggaaacatcgggagcttgtaaaagtgatagttagaggcaaatctcttccacaagtcaaacatatcgccatctctttggaggctgagagtggaggagtattggtatccgttgataaaaccatgaaaggctatgcgattatactctatcgcggaaagaattatcagatgccatttcggcttaggccttcaaacttattgacgagaaaaaaggcttttgctcgatccattgagcttcaaagaagagaagtaatgatgataataattttacatgtaacttgtgtagataattttctgttctgatcaatattggtctctttgtctctgacaggcactgaagtatcatgttgcagacctagaggaacggattgagctgttgaagaccggacaggtttgataaaacttgaatgctattataacatatcaatctactttaaaatcccttatgagtaaacaaactatcattgacaattgatccaggacgacgatatggaaacccgcaacaaaagtgatgaagaggaagagaacttgtatttgagagtcgatgaatctgatttttcttctgacgaggtgaaatgaaatcctcctgaatgttcttcatcagcatttgaaaatttactcgaaccatggcatatctgagatatttttttttgaatcaggatgaatctctggaatgggagtcagaaaagaatgaaactttcttatcatcagagggaaaagaagaagaagaagcatgaacgggtaaacgatttagcaaacattttttggctaaatcgttttacacaggaatggatcatgatttgtaattagataaacaataaggtgatgtatgaaatatatgtattcaacaatctatatgttagtttttatctgtattaacttgtgaagtctctgattagagtcgaaatttcattgcaagatattaaggatccaacaaattttctgaaagttcccagtcttcttaatccaagtattcaaatctcttgaaaaatatttctaatacaaaaataattcaagacccgccaaaccggttgatgaaggatcaattaatatataacgattgataaattataatagagaagatccatatgtctatttaccattcttcagtttctcttgcaacttcaatacgcatgtgtcctagtttcccatccatggttttccttactattgctctgtgatcaccctccaaacacctagctgaaggagcatcaccatcatacctgtaacttatgtagaatattagcttacaaaattttgtatcatgctagctctttttttaaattgagctttactcttattacttaatttcataggacgtgctcgtgctcgtgttaaggaattctgaaaacgacatctggtagtataaagggaaatagggttacacgcgagtgctttctcatttggcaactttctctgatttttctctacgcgagcggcgattgcgactatcatttccttgtgaattctcgtctgtctccggtaactttctctccattttgctagctctgttgttagcttgttacgcattatgctcgtagtttggcctgtctcagtgcgattagtgaaccagtaatgaactttaagtaacgttttagggttttaatttttccttggttgaatgatgtaaacccttctttaggttaaaggagctattcaacgtttgtttggtttatagtctatagcttctcgctcgacctctgcaacttaaaaatggttatgtttatgtcaaaacttgaaaccatgtttatgcttgatacttgggtctttttggctctgctttatatgtgtcttctttcctctatgtgtttttctgcttgattctgctggattatgaatatctttcttctgcttgcttctacttgaaaccagggataagtgattgcagatggctgagcgattattacaatctatgtcaagggtggctggccgatgtcatccagattgcgtaaaagcaagtgatgagcaagaagattaccgtaaattctcaaatccttttgaactgactcgttttcatatgaataggttcagtatatgaattgactacaacattttcatcttttgttgttgttgtttggcagatgcatctcaaaatgcagctttggtagctgtgaatctgattagctctgcaaggttaatactgaaactcgacgctgagtttactgagtactcagctcagtttttgatggacaatgctggaaaggaagacgacccgggagaagtggatcaacaacgcaatcaggtcacgaccgaaaactgccttcgctacttggccgaaaacgtttggaccaagaaggaaaatgggcagggaggaatggatcaacaacgccctgtgctcactgtcaaagactgcttggaacttgcttttaaaaaagggctgccgagaagagaacactgggcacatttgggatgtaccttcaaggctcccccatttgcttgtcagatacctcgcgttcctgtgaaaggagaagtggttgaggttaagacttttgatgaagcattcaagctgttggtgcatcaacccattggagcaaaactgcatttgttcagtccgcagattgataatgttggagaggttaagtgttgtaagttaaatttcaaaatcttaagagattagtgacaaagttttgttctaatcttgttcatctttttttatgtgtgatagggagtttacaaaggcctcacgacaggtaatgaaacacactatgttggacttagagatgtgctaatagcttcagtggaggagttcgagggagattctgttgctattgtgaagatctgctacaagaagaagctttcatttatcaaagtgtctttgagcgttaggtttctctcagtagcacatgatggtgataagtctaagttcatagcgccaacaggtctgcttgttgacttctgtgtcccgcgcttatctatcaactaaaccaaaagctgagatcttggtaagtatctggactatatgctagatgtggaacttgtttgtggtgctacaataagagttgttttatgagactattttctttaagttaagaagtcaagtatcttgaaaaccatatcctatttgtggaacttgtttgttgtccgacattatgattgtcttaggatgaacttttatctataagttgaagaagtatttgaacttgtttatcattccaaattactgttgcccaaatttgaagggatcttttcaagcttctgaattcataattggatttgctcatagtttagtgagttcttctatatagattacacaataatgattgtattatccgtgtttaccaatataattttagtgaaaaatgcaatgtaaagttttactgagaaatgagaagaattgagtcaccaagctgatggtacatactacataagatagactactaagaattttacattgaccagtagaaatcttcaaatctctataaagtggcccaaaataaaaacgatttaaaattgcataaacgatgttgttgtttaagccttcaacattggcaaatgatggcaatctcagaaaaaggagtcatggcaatctcagaaaaaggagtcatggcaacgaaaattgacaaaaacggcgtcgtattgagggttaaaagttgaagtccctaaaccgtcatcgtattggaactacgctgagggggaaataagctttcgcgaagcttcgagagttaaggcgacatttcactgagttttctctacgcgacgtagatctgtgtctccggtaactttctcttcattttttctttctctgttggattattttacttttttttttggctttgttacggaacctgctcatgatttgacctagtgaactcttagtaacgttttagggttttaactttttttcttggatgaatgatgctgggtccttctttatgttagagttgttctttgtttaaagaagttatcaacgtcagtttgctttagtttataaagcttctcgttcgacgatttttcctctgcaactagaaatggtggttctgtttatgtcaatactagaaaccgtgtatatgcttagctacttaggtcttgttttggttttgctttatagatatcttgtttctgaatgttttcttctgcttgattgtgctggatttgtgaatgtcttcttttgtttgtttctacttaaaaccaggagttcatcgcagatggagtcattgttagaatgttttgcaatcacggatggcaaatgtcatcccgattgcttaaaagcaaacaatgagcaagaagattacggtatattatcaaatcttgaatcttaaatttactttctttgcatcattataagaaactgtgatttggttttaactgttattaactctcgttttaacacgttcaatctaaatccttttgaaataatcagatgcgttgacttataacatttttatctttctttttgtcttgcagatgcatgtcaatctgcagctttggtagctgtgagtttgattagctctgcacgtgttatcttcaagatcgactctaagtatactgagtactcacctcagtatttggtggataacgttgggaaggaagaagttgagggagaaatggatcaaccaagctgtcagtacactgtcggaaacctccttagttacttggtggaaaacgtttggaccaagaaggaagttaggcagagagaaatggatcaacaacgccgtgagttcactgtcaaagactgctttgaatttgcttttaaaaaagggcttccaagaaatggacattgggcgcatgtgggatgtatattcccggttcctccatttgcttgtcaaatacctcgcgttcccatgaaaggagaagtgattgaggctgcaaatgtgagtgaagcgttgaagctgggtatgcaacaaccagcggcagcaaggctgcatttgttcagtccagagtttgatcttgttggagaggtaaagtgatgttacttaaatttcaaaattttcagagattattgaattttttttgatctaatcttgttgatttttttgtgtgtgtggtagggtatttacgatggcccgtcaggtaatgaaacacgatatgttggacttagagatgtgctcatggttgaggcggagaagatcaagggagaaactgtttttactgtgcagatatgctacaagaagaagacttcatttgtcaaagtgtctacgagaagtatgattctcccgcttaatggtgacgacgagtctcaggtcacagagccagcatgtctacttgttgacttctgtatcccacgtttttctatcaactaaccaagtgagctgagatcttggtaagtatctggagaagtttatgctagtttgtcgttcctatattaagaatgttttatcagacttatattttatgtttaagaagtgaagtatcttgaaaaccgtatgcttgttgtggaactcagtttgtggtctgaaattaagatttgttttatgagacttttatctgtgttttaagaagttgatcgctactactttctaaagatatatttagaatctatctgttgaatgtgacaccaattgtgaggattagtattttactattttaaaagggcaggagcatattgaagaccaaaaatttgttgactattgtaaactggctagtggctaatagtcaactgatattgtggctatgtcaacggtcaacgtgacgattggaacagacaaaaggcatggttcactccaagcccaagtcaccgatttatttatttatacccaactcaattaccatacataactcaaaagagacatatgccattgccgactagaaaaaaaaacgactctaaactaaaaagatagaatttcgtttttcttgtataggtagacttttattcatcttcacaacaaccaaatttggctgcaaagtatttataacgtttaatttgttacgttgtactgctgcggtacaaatttgaagattctaagaatgtcttttcatgatgctgttgaaacacggattaatgttgaagctt

SEQ ID NO: 645 - DNA, 98401 bp, Arabidopsis thaliana
gaattcataattggatttgctcatagtttagtgagttcttctatatagattacacaataatgattgtattatccgtgtttaccaatataattttagtgaaaaatgcaatgtaaagttttactgagaaatgagaagaattgagtcaccaagctgatggtacatactacataagatagactactaagaattttacattgaccagtagaaatcttcaaatctctataaagtggcccaaaataaaaacgatttaaaattgcataaacgatgttgttgtttaagccttcaacattggcaaatgatggcaatctcagaaaaaggagtcatggcaatctcagaaaaaggagtcatggcaacgaaaattgacaaaaacggcgtcgtattgagggttaaaagttgaagtccctaaaccgtcatcgtattggaactacgctgagggggaaataagctttcgcgaagcttcgagagttaaggcgacatttcactgagttttctctacgcgacgtagatctgtgtctccggtaactttctcttcattttttctttctctgttggattattttacttttttttttggctttgttacggaacctgctcatgatttgacctagtgaactcttagtaacgttttagggttttaactttttttcttggatgaatgatgctgggtccttctttatgttagagttgttctttgtttaaagaagttatcaacgtcagtttgctttagtttataaagcttctcgttcgacgatttttcctctgcaactagaaatggtggttctgtttatgtcaatactagaaaccgtgtatatgcttagctacttaggtcttgttttggttttgctttatagatatcttgtttctgaatgttttcttctgcttgattgtgctggatttgtgaatgtcttcttttgtttgtttctacttaaaaccaggagttcatcgcagatggagtcattgttagaatgttttgcaatcacggatggcaaatgtcatcccgattgcttaaaagcaaacaatgagcaagaagattacggtatattatcaaatcttgaatcttaaatttactttctttgcatcattataagaaactgtgatttggttttaactgttattaactctcgttttaacacgttcaatctaaatccttttgaaataatcagatgcgttgacttataacatttttatctttctttttgtcttgcagatgcatgtcaatctgcagctttggtagctgtgagtttgattagctctgcacgtgttatcttcaagatcgactctaagtatactgagtactcacctcagtatttggtggataacgttgggaaggaagaagttgagggagaaatggatcaaccaagctgtcagtacactgtcggaaacctccttagttacttggtggaaaacgtttggaccaagaaggaagttaggcagagagaaatggatcaacaacgccgtgagttcactgtcaaagactgctttgaatttgcttttaaaaaagggcttccaagaaatggacattgggcgcatgtgggatgtatattcccggttcctccatttgcttgtcaaatacctcgcgttcccatgaaaggagaagtgattgaggctgcaaatgtgagtgaagcgttgaagctgggtatgcaacaaccagcggcagcaaggctgcatttgttcagtccagagtttgatcttgttggagaggtaaagtgatgttacttaaatttcaaaattttcagagattattgaattttttttgatctaatcttgttgatttttttgtgtgtgtggtagggtatttacgatggcccgtcaggtaatgaaacacgatatgttggacttagagatgtgctcatggttgaggcggagaagatcaagggagaaactgtttttactgtgcagatatgctacaagaagaagacttcatttgtcaaagtgtctacgagaagtatgattctcccgcttaatggtgacgacgagtctcaggtcacagagccagcatgtctacttgttgacttctgtatcccacgtttttctatcaactaaccaagtgagctgagatcttggtaagtatctggagaagtttatgctagtttgtcgttcctatattaagaatgttttatcagacttatattttatgtttaagaagtgaagtatcttgaaaaccgtatgcttgttgtggaactcagtttgtggtctgaaattaagatttgttttatgagacttttatctgtgttttaagaagttgatcgctactactttctaaagatatatttagaatctatctgttgaatgtgacaccaattgtgaggattagtattttactattttaaaagggcaggagcatattgaagaccaaaaatttgttgactattgtaaactggctagtggctaatagtcaactgatattgtggctatgtcaacggtcaacgtgacgattggaacagacaaaaggcatggttcactccaagcccaagtcaccgatttatttatttatacccaactcaattaccatacataactcaaaagagacatatgccattgccgactagaaaaaaaaacgactctaaactaaaaagatagaatttcgtttttcttgtataggtagacttttattcatcttcacaacaaccaaatttggctgcaaagtatttataacgtttaatttgttacgttgtactgctgcggtacaaatttgaagattctaagaatgtcttttcatgatgctgttgaaacacggattaatgttgaagctttattttaattgacataagagttttcatgatatgctactactactactactagtaggaggacaaaatgtaaatgtgttagattctcttttacaaataaggaaataacaaatttatgcttatccagacttatccaaaagccaaaaatatctacgcaatagatagtactaattttgtgtataataaacatgagatctttggacaagtaacttcttaagacataaatacactattttgcataaacaagaaacttggcttccgttttcttctcatgaaaagcttatttgcttgcacagctcagctcagaagtcagaatcagaactcgtaagatacatccctctcgaagagcctaccatctttatcgcgttacaacaaaattaccaaaatctgccacttccaagaaacttctgagatcctcttctggaaacgtgttttttcctcaaaagtaacaacaaaataagaaagacacgaaagagcctcattatttatttaaacatattaagaatattcctattgaagacaaaggcatacaaaggcaccaaccatgcccccttaccgcgtaaatctataaaaaaaacatacaaaatcaaatataaacaactaataagaatattattttggactcgacgattaaatgtttttaattattgtattgtgttgggttttttttttttttttttttcttttttaacttttacgccagaaattctacaatcccttggaagttatttttacttataacttcttagtccaaaacatgataaacgaaattaacgttctctccaacggctaattaaataaccattaaaagtttgaattaactacttcaaattttaaatgtgtagttggaaaaaataatctgaaaatggattggtaagttcctaaataatcgaccaattctcttcttactaaaacaataagctagaacaattttttatagaccaattctttttttattttaatgaatctcaatatagtcaatactcatacataaaaaacagaaaaatataacctagtcacatctatataaaatagagccagtttttttttttttttttttataatcataagataataataagactagtaaaccaatttcctttactcatcaaatgtcatagaaaagactaataaattaaactcacaaggatttaatgccaaatcttctagttgatatatatctaaatccagtattactaaattagtttgtacttgcactatgcatatcgaatctaatatatataaggcttaataaaacatgtgtttctttttgtcttttatcaaaaacaagatttacgcggtgcaatctcaataaaacagtaacgagtaaacgctttatctaatcaaaaataataataaaataatctgcaaaaaagaaagtcaagtcaccgtcaaacccatcccgcttagcttaccgcgttcacaccttcacgcgcttccttcgtcctttgcgtctctctctatttttttacaaacacagacaaataaacctttttcatatatatatatcgtctgaaaccaaaaccaaaaccataaaactcaaaaatctttggtcttcaaacttcaaacacttgagaaaaaagcttttgatttcacatcttaatctaacaagtcaaacacttttcaaaccacaaaattcgtcaaagctctgaaacaaataaacattttttaatttctccctttttaatggaaatctcttctttcccatttccatacctacaagacgacgagtgttcccatttccttggtctatttcaagacatggactcttctccttctactttcggattagaaggttttaatagcaacgacaataatactaatcaaaagaaacgcccaagaaaagacgacgaaggcggtggtggtggcggcggaggaacagaagttctaggagctgttaatggtaataataaggctgcttttggagatatactcgcgacgcttctgttgttagacgaggaagctaaacagcaacaagaacagtgggattttgaatttattaaagagaagtctttacttgaagctaatcataagaagaaagtgaaaacaatggatggttattacaatcaaatgcaagatcattactctgcagctggtgaaaccgatggttcgcgttcaaaacgcgcacggaaaaccgcggttgcggctgtggtttccgcggtagcttccggggcggacacaaccggtttagctgctccggttccgaccgcggatatcgctagcggttccgggtcaggaccgagtcataggaggttatgggttaaagaacgaaccacggactggtgggacagagtaagccggcctgattttccagaagacgagtttcggcgagagttccgtatgagcaaatcgacgtttaacctaatatgcgaggagctagatacgacggtgacgaagaaaaacacgatgttaagagacgcgattccagctccaaaacgcgtaggcgtttgcgtttggcgtttggcgacaggagctccgcttcgccacgtgtcggagcgtttcggtctgggaatctcaacttgccacaaactagtcatcgaagtctgccgcgcgatctacgacgttctcatgcccaagtatctcctctggccgtcggattcagagataaactcaacgaaagccaaattcgaatcggtccacaaaataccaaacgtcgtcggatcaatctacaccacacatattccgatcatcgctccgaaagtccacgtggcggcgtattttaacaagagacacacggagaggaatcagaagacgtcgtactcgataacagtacaaggagtggtcaacgccgacgggatcttcaccgacgtttgtatcggaaacccaggatctctcaccgacgatcagatcctggagaaatcttcgctttcacggcaaagagcggcgcgtgggatgttacgtgacagctggatagttggaaactctgggtttccgttgactgattatcttcttgtaccgtacacgagacagaatctgacgtggacgcagcacgcgtttaacgagagtatcggagagattcaggggattgcgacggctgcgtttgagaggctcaaaggacggtgggcttgtttgcagaaacggacggaggtgaagcttcaggatctgccgtacgtgcttggagcttgttgtgtgttgcataacatttgtgagatgaggaaggaggagatgttgccggagttgaagtttgaggtttttgatgatgtggcggtgccggagaataatatccgatctgctagtgcggttaatacgagggatcatatctctcacaatctcttgcatcgtggacttgccgggacaagaactctataggctctgtttttcaccttttcttattttgaaactgattttttattgcaaattctttttccaaattaggaataaaaacattttagggattggttggatacagaaagaatagttgaattgagagtagaagtggctgatgatattgtttgtgttacttattagcattgtgtaatctttagttcatgtattttctatacaaattgaatctgaaacctcttaagtataagcttcttctctttcgatttttcacaaaattggtcgactagaaaaagaagaagcaattccacttttattacaagctcaggctcagacagaagtacaagtgtacaaccatgaataaatggaagttgtacttaatctgtttcgtttgcaggatcttccttatctattgatgtgttgagctctttgagaaggaatgcaaatttggaagcatgttttcctttgtcattcattatttgtgggctaaatgatacaaagaggaaagccatatgaacatgttatttactgtcacatggcgcacacagaggaaaagccatatgaaatacaacatttgaatatgaaacttgttggaacttttttgacaaaacttttccggtgactttccggccaaattccggccaaacggctgaacggaattgtagggtcattagtgcattggaaagttagtaaagagtactacaaaatggtatacacatacgtcaaaaatgaagttgtattgaatgagaaataaaggtgtaaagtgggacacttgggccaaaccggaccgaaccgaaccaggctgcgggttgtcgggacgtcccgtcgtcggctcaagggctttcagacttgcgaaccgtcatacttgtgagttattgagtttgctgagttgaatcttatggaaatattctcaggatggtctcaaaatattctcaagatagtttcaaaatatgtcatgtttatcctgagaatgttctgcaaaatcttatctacttctactatataaagagattcaacctctcattatttctaaaactctcaaacacaaaacagtctaaattctaaaatctctcctctctcttgctttttaaaagtaatttcttagtttactttcacataaacatagtcatgattccattgatttaaaacttaaaagtttctaatcatgtttttttttacaaacgtgaatgtggattaaatgagatttcaatggaaagaaaacaaagaattggagatgcaaatttccttaaaagccattaagcttactttgtgattgtgattatccaagtatataatttaattcataaacagtaacaataatcttcattcatcaatcgtcgcagcttatttccttaaaaagccaatataagctacttttcaagccggcttgactcatacatattaccagattaccccaacagtcaccatgaggggacgaatctcctctggggttaaccaatgggtactatcgtaatttcacaatcaccaataccattgccgatcaaaaacagcaagcaacgaacgcgcggttcgtctcgatcccgtcctctcatggctgttgtcgttgcagagacgtcgttgattttcgatttcgatttcaagcttttcacgtactcattggaacgatccaatctcaaaagtctctgattttgggagagagcttcgttaaactcagcgcgaattgtaatttcccttttgccgcgattttggattacaaggtacgaggtttttgatttctcatcttcaatgattgaagtttgatctgggttctagaattctaattctgtgtgttgccctttgttttattcggcttattgaagatgcttgacttcgttttatgaagttcgtatcttttttgattcagttctcttctagggttttcttgtgttagagctctgaattttggtaatttttttggtaatgaagtttgattatggtggaaacacgaattttcaggagaagggttagttcaattttatacttttgcttggaaaagtaatatgtttgaagttggacatttagtttcataattagtcggcaatgcagataagctgtgaagaagacatttaaaggaattatctttcgttcttttcgaattgaatatggtgttggggttggtttaggtattttgtttggattggtgattcttcaacacatttcacctggatcttagttagagaaagaaaggacagttccatgttagacttgtttgtgtagttcagttgccacttgactagaacttctccttttttttgtacattagctaaatgggtagattcattttgtttccttatttgttgaagctcttttattgggttggttagttgcttcgttttagatgaaaattatatgcggtgttatatggctctgagcatgtttccggaagttgctggcttaatgaagcaaatacatgcgaagattatgtgaagaacctaaagtactctgaaaccaaatttatacttatattctagtgtttctatttatgtatagattttaaaatttttatgtttttttttggttttaagacttggttagtgcaaatggaatggttcattatcttggttgtttttatgtatactcttgtttctattgcaatgtcattctcgtggtcaatgtttgttgctaaggttttgattccatttgtcacttttgcaggtgaaataatttgacagctgaggatttaagcatttatgtgctgcaactctgcaagcttgtcatgtaccactgtttgtatattgtttataaataaaacagtggacttaaagttaagggaatgtcagcacctgggaagtttgattattcttctggtgggccagagaggcctttatacaggtccaacttagctgcacaaatggaaagatctagtagctttcgtgagacgatggaacatcctgtctcgtcatctcacccgagcatgttgaggagcacttcaccaatagcacaaaccgatgtaacaaacttttttcagtgtttgcgttttgatcctaaggtggttgccgcagatcataagtctattcgtcaaggtgactttaagcgtcatgtgaatatcgctcttgggattcaaggagatgaatctccaagcacaccactgaaagggaagttaattccatctcctataccagaagagatcaagaggttaaaggctggtctgcgcgaaaacaatgtgaaggccaggtaatttttatacgataagttaagaaatcttctttggagttccgagtccagtttagctaattgaatttttgttgttgcagggagcgtttgaaaattttcaacgaagcttcttctgtatttaacaagttttttcctagtgtacctacaaagaaaaggtctcgtccagaaggattttctaatgaccgctcaggtgatcgtttggctttagggccaggtatgggtaaaatgggaatccaaggtcagactctgcctggttgttttgagcttgaccagcaaaagctggacgaacgacctaaaagtggtgcattgaataagcggacacgtacttccatggtaagtcctgatttttgtttgacaacacatgctttaggtcggttcatacttaaactgaacagaccttttgtgtcatgatgtagtcttctataggtgcatattttgattcagtgtttggttctgttattctagaaaaaaagttagaaatggtagtagtggagaaaattctcgtttaagataattgtgcttccaaatgtgatgcatgtgaaatattgttttcaaagcagggtaaattagttagaattactcttcttagatctacatagtttctcaattgctttttcttttctttcatgcttgtgttctgaccttaaaaattcttttgatactacagggttgttgtttttaattttgattctgaattttgaaagcatctggcagctattccattatttgctattactaatacaaatgttttaattttgctatatgtgattcagatggatgttcgaagtaatgctattgttcgacaatcagccggtgtagacagggataaagacacaatgaggctggcaaaccataatgcagttcagggtgaagatcgatcttcaattggtattgatggttgggaaaagtcgaaaatgaagaaaaaacgatctggcatcaaaacagatggtccttctagtttggcttcaaataaagctgttgatggttatagggacttgaaacagggcataccgaaattagctgttgattcccgctcgagattgaatggtgactcaaacatgttaaggtatggcctactgtattagatcataacttttttggttcaatcagttaaaagatccattgtttggagttgattaggaaaatactcccaaatagatttctttcctatttttaaatgattagattgattcttataacattggatagatgcgattttacgctctcttctgatggctattcaattggtaacagttcctggttgaattaattgtgcaggcatggggcagtgaatggcgctgttccatatgggagatctgatagcctctctcagcagacaggtttggcagcgcgttccttgctctccagggattccgatcacaatccgttgtacaatgagaagagagaacgagctactggttcagataaggaaagggtgaatctcagggctgtcaacaagtatgttaacaaacttacaatcttaaccacatctgtcaatttttctcctgatctcatttgtcaaatttttagcctctattcttcttcctgatgattcttttttattcctgttactctctgctgggttcattgcaggtcaaatattcatgatgaatccaattcttcaagtccgacttcaaacctaaaaataagtgcttcagttcgtggtccaagatcgggatcagggctgccgccgaaactttctccggttgtccataacactccctctccaagtgattgggatattgctggctgtacaaacaaacctccattgttgtctggggttcccaatcgcaagcgtatgacatcgaatcggtcttcatcaccacctgtaactcaatgggccagtcaaagaccacaaaagatctcccgtgttgcaaggagaacgaacttggtccccattgtttcgagcaatgatgacattccgtcatcggataacatgtcagatgttggttgtagtgaaacaagttttggattttatagacgctcgcctgcagcttctccacaaatgaaaatgaaaggtgaaaatagcttgtctacaacagctttatctggaagtgaagaattcagcccccctgagatcaaatctaaagacaagggaaaacaatctgatgaggtaaatggtaaaacttctcagaatgttcctaaagtctccatccctggtttacaatcaagaaaaaacaaacttgcctctggagaagagcttggggatggtgtgaggagacaaggaaggacaggccgtggctttgcttcaacaaggtctgtcaacccaatgggagtaatgaaacatggaacagcaaaacaacttcgcagtgcaagaaatggttctgacaagaatgaaaggtagggaatcctgtctctaagtatttctcgttttcagttttctagtatttaagaagtgtttgggtttcatgaggcttatttcctagttttttttttcatatggttactgcagcagggcaggtcgtccacccactaggaaactctctgaccgcaaggcttacaaacgtcagaaaaatacagcgaccaatgctacaacactagattttcttggtaaaataatttcaattgatcagaattgttctttgacaggattgatttttcccctcttcttttatttatgtttttttttgaaaaacttcttattggttcagatgatgggcatgaagagctactagctgctgttaactcggctatcaactttggtaagtaattgttcatggttctcgttaagtttattttttccagaatttttttaatcaagaataattggtttggttctttgatgcagctcaaaattttcctagctcgttctggaagcaaatggagcgctacttttgctttatatctgatgcacatatcaatttcatgaaacagcaggtaagtggttttcctgcatttcgtaagacagttaataccctttagacctcatatctgaaggatgtgacagatcatttgtatatgtctatttcttgaatcgttgtataccactaattaataccagtagcactctacgtcctgcatagtagtctagtaggatgggagttaaatgtgctgcagagattactgtgatgctgatttctagtttacgtaacactagcaaggttttcattatcgggtgtgtatttatattagtttcatttgtcccaaggtatttatactcaccccaaccaatccctaaatgtgaaaaagaaaaatccaaaaatgtgaaatatggtaggaaatgtgtgtagatttgtaatgttacgtgatctgatgatacatagcatttgtgagctgtttgcccacagttttgtaaagacaattacggctctaataatatgttgactcttcattttagataaatgttataaccattttctctctcagggcgaactctccttcatgggtactacacctggtgggacatcttcagactttgatagtcatgaaatatttcccgaggaacttgcaagtagcaaagtggattctaaagctgcccccctttatcagagattgctatcagctctaatttccgaggactcagccagtgtaaatgaagatttacaatttgatggatttggagccgatgttgagtcagaattcagtgttttgaatcatatgatggagttcaatggttataggagcgatagactggaatttgatgagctagaagatgatgtgtctgttatcccgctcaagggtgttaatagctcagcacaccatgtcaatggaagactttcagatcatttatccatcgacttctcagacattcagtatgaaactttggggatagatgagaagatttatatggaagctcaatctattggaatttgcttggaccccatggtatatatccccacgagtttctgttatttcagaaatgctgcttgcttatatgctattggaattggactctaatttctatagttcctagcggattgatgtgtgactgttgtgttttcttgcagcctagtatttcaaacgtggaagatgaaggaattgttgatgacatcaaaacgttagaggaagctatttgtgaggtggtatgttctctcacgtgctcttatctttttgtcaaaacaatatagcgttggcaaattatgattttttgtcgcttcaatctatcttggccatttttcatgtcgtagcagtaaaggacaaagtacaactgtgttctctagatagctaactttgtgatgttgtctatcttaaaatttaaggtttccaagaagaaagatatgttgaatcggctattaaagcctgccctagagatgaaagaacgtcaggagaagtaagatttgtctttcttccgcttttacttgcatgcctttaatgatctagactgtgatctgacggttttgtgctgacattttttccttacacagggagtttgagcggctcggttatgaaaaactcatcgaaatggcatatgaaaagagcaaggtaaattctctcataaaggggttcacttttcagatttattccactgttgaccctttttcctcttcgttttctgatatagtccagtttcatgttttgattatcatatatggattttattttacaggcaagtcggcggcatcactctgcaagtggaaagagttcggcgactaagatatcaaagcaggccgcgtttgcttttgtgaaaaggacacttgaaagatgtcgtcaattcgaagaaacaggcaaaagttgctttagtgagtccacatttaagaatatcatcattgccgggttgacacaatttgaagataatcccacagacaaggaagatattctatcagcttcaagtatgatatcgtttttcctttacagaacattgaactatgttttcaaatccagaaactctctgttaattttaatctttctttttttcagcactcatgggatcacaaccaagctcatcattggcattgccaatgacacagagcacggagaatcatgccaattcttctgaaaatgctttacgggaaggcagagatgaaatgatgtggtcaaatagaatgaagaagagagaattgctgcttgatgatgtgggtgggaaaccactatcaagcagtacgaaaggaaagagaagtgagagggacagagatggaaaaggacaggcttcttcgtcaagaggcggaagcactaacaagatcggtcggcctgcgcttgtaaatgccaagggtgaacggaaatcaaaaacaaaaccgaggcaaaaaacaactccgatgttttcttcttcttctacttgtgtcaatatcgtggagcaaaccagaacatcattgtcgaaaacaactaacagcaacaacagcgagtatagtaacttggagacactggatgagtcagagcctcttgacctatctcacctgcagataccagacggtttaggtggtccagatgatttcgatacacaagcaggagatctaagctcatggttgaacatcgatgatgatgcattaccagatactgatgatctccttggacttcaaatacccatggatgatctttcagacttaaacatgatggtataaggtctttctctctctttatttctgtatagtctcgtttgttataccattagcgatgaagaaagatgaaggcaagttttggtcccctgaaaggataaccagtcaccataatcggttatttgggtaggctccagcaaactaggcgatataggttctgattatttttcttcttcatcatcatcttttagggttctttctttccctttcttatagttgaattacgtgggtggtgaaactgtttttgtttattgggtaattgggtttggctccggtggttaagataggtccggtagttcaacttcaggagaggaaaacgagtgatagtaatgttgtgtagtgatatatagttaagtgggcaggtcttcttcgtctttttggcattttgtagctttcataacctcagaaccattattattgcctctgtacatacacacattttatgttccttaataattaaaaaaaaaaaaatcagcttttagtgcaagaaacaggtctcactctaacatattatgctaacaagtcatcatcaatcacgccttcgatttgctaacatatagtgttatgaattgaataacttggagttaagatatcaaaatgaattttgaaaggacattatgaaatatgaaactaaaataatgacttgtatatttgaatcgcactctaattctccctttcaagtaaatatcaacgtcgaaacaaaaggtatgaaaaaccaataggaagcaccaaaaacaggtgttttcatctatctttagatatgagagtgagagttgcgtttatagcattgcggttagttttggacacagcttgctttagcgttacggttggagacgctctaacacttcgtcgctgctgctcaatgacaagctcgctcgcaaaccactctattttctctgaattgctcatttctcctatccttttgcttccgaacaaaaccgactccacattgttttgcttcaacatctcatcagctatctccgtcagtttcttcacattctctgctcttggatccgtgtccacgttcggtccacaagctcctaatcgcgatccatttgcctgctgcaccacaatttatttctctaatgattttttcatccaaaaaacgccaaaacatacaacgttgtctccaatcatgataaaaaagaaaaaaaacctgaatgcgaacgtaattactacttcggtaaggcccaaagcccatagcaacagcttgatcaacaaactcagcagacccatcaccagagattctcgccatgggccgagcccattccttaacgcgccaattcttaacctgttcataatcataattcacttcaaaaagctgaccagtcccaagcgacaacaccaacaaatcctccactcctttcaccgccgggaactcctgtttgttatgaaacacgtgcgttatcgccgccgccgtcggattactcatcgctaatccaccccccaccgcaacgcaccgcgttttcccgtcgacggaacacgtgcgaaccggatcaaacgtccccggctccgcccatgtggcacggcaaatatctcggagacgaaaatcgaaactgtcgctttctaacgcgtcggcgcgtgagaatagaaacggagccgtgcttgagagatcgtagcaagagatgagaattggtttgagtgtgtctttaagcgttagatcggcgaatgatgctttcattgctttttctagcttcgccgttgcggcggttactgaagatgatccggatccggatccagatcttatgacccgtttaatcgccgctcctgctcctcctcctccacttccgctccctgatctgtagaatccttctgcgttctctacgagaaatttccaagtgtcctccgccttgaaaatcgggcggttgccgtctcttgtcgcaaatatcatcgcagcgaatactccaccgacacctgatccggcagcgacgtcgaagtaatcggcgattcgagcgtttggatcgccggatttctctttcagcatttgctctaaatagattagggattttcccgccaaaagacctctcataccgccaccgtcaatgctcaaaacgcagattcttcctctcggacttctgaaagatgaagacggtgttcccgggagaacgacgccgtttggagtcaacggtgatctgggagaaggacctgcttcggaatcaccgggtcgtaatggactctgaggaatccatagtagccttgggtcttcgtaaccaaagagaaatttgctttcgagaattgagaagatctcgtaattgagcttatcatcgggttcgtgtgatcgagccgttgataacgttggactggtttgagtcctctcgtaatttccaggagtgttgggagctgtgtgattgacaaaatgcttcttcttccctttggaggaaactgacaatggcggtggcttttcgtagcgccgattcataatcgttagcttttagacaaaccttgaaattgaagcttccgtagctatagtatgagaggtgtttttcaaagacgtgtgcaaaagattttaaaaatagattttgatttggattttgtatgaaccaaatggtgtatgttagcatgacatggctaagcactactcgtgtgcttggaaaggtctggtacccacgtccgatgcctcctccagcaaatttagctcatatagaattttcttttctatcttctttattcttgagtaaacatatactaatttatttaatttgtttaaacatagcagtttattggttggttggcagatatacctaatatatccaatcacataaaagtattcgaggaatgttattaatttatctgagtgcaatctaaattatctaattaaaaaacagtataacacagttcacattttcttactcgaatctcagttttcacatcgaacagttagattgtggaagctttcttaaaagacaagaagaaaagtgaatgaagtcaaaatttgagacataagaacagatgattcttcttttcccaaatggattccaatctaacgtatcacaaaacatgaattccaagtgaatttttttaaataaacactctcatgtaccttatatatctataatcttaaaatacagcaatttaatatatctatatgtattataaagatcattttatcactggaaggtaaaacaagaaatcttcagatgataacaggaaccagatggtgatattatgtctcccttgtagtttacacggagaacgtaccagacaggttcccaagtgttgcaagtggcgatcctgcatctgtgaagtaggacgcgagattgatccccgagtagtcgtatttgttcaagaaaggatgttcctgaaattgtttgacacagagtatgattcaacatttcaatggatgaaaaacatgcaaaagggattatataaaacaaaccatcagttcctttgcagagcttcgactgtttggatccttctgcaaactggatgagagtgtagagtggaatatgttaacttagtaaagtaatctcagtaaaagagggagcaggaattttttgagagattaccatgtggagatgaatgaagataactcaggggagaaatttcctgaaggaagagcgggtggcggttggtcaacaatggcttccatcaactcgaaaacactggtccatgtttcctcttgattcggaggtgcataagggaactttcctgttgcacattcgagtactactaaacccaagctccatatatcacttttatttccgtacttgtttccaacgattctctctggctgtaaaaaggaaaaattaagattctcaatttttataacactcgaaaggggtttcaaactagtcaatgctcaagagacaaataagatacttacagacatataattgtaagtccccacaaatgtgtttgctaaacctgcggtgtttgtcataacggtactcacaccaaagtcagttattttgacttctcctctgtggttgatcaacagattggatggtttcaagtcacgatggatgatatgcctatcgtgatgaagatagattaatccttgaagcacctgcaataacagaaccaataaatcacatcaatcaaccaattaacagtgaagcgtatagtttcctgtgtatcctgtgtttcttacttgtctaaagatggcagaaagataggagtcagggatggctttaactgacttgagaaagtctgctagagatcctccgtccatgtactccaagattagtgagattgcgccattgtcataaaatgactggtacgaggtaacaagatttggacactgtgacgattgatttattttgagctcttgtgcaattgccttgcgaattgcttcatcaatatttagttgaatgacctaatcatatagcatcagagttatgcacagtgagtgacaaggcaaggaagaaaaagatttgtaaatcttcaaacacagagaaaagatgaggaatttagctcatcatatacataaaagaatctgaaggttaaccaatgagtaccttcaaggcgaaaaattggccagtccatttgtgttgaaccagctgaacaacaccactacttcctttgccaatgactttaaccatatccaaatccgacaagctcagctgatcatcagctggcttaattggagacagctgaaacacagtcgcaaacgaaacagattacaaacagtaatctagaagatatgagcttaatccctgagtttctctatccagaactacagaaatgatcttaagaaggttctaattatgatcagatccaccaaccacattacagttaatgcattcaaactcaacaaaatcttcatatgcagtacaaataaacaatcaaacctaacactcgcgaaattcagtaaaatcagcaccgaacgaggaagaggaaagacttacgacttcaggctccaattgagaaatgattcgaactccatccttgttaacacgtagatctccatccttaaacgtaccgctttgagtcctacagagagaaccaaaacctttcctccttcaaaaacaaaaccagagacatttccacacacaaatacatctatctatccacagatccatggagaaagagagatcgagaaacatacaggaatttggtgatggattgctcgccagcaacaggaattgcgagcttgagattattgctgaatccacctttcttcatcgtcttcgtctacttcgttcttcgcttcttcctttttgttgtttcctcgtcattatatattaagtaaaacacagttttaagcataattcatgtacttttcagccagaaattggaatttggaaataaaacagccattaattaatattagtcaagcacatgttcacgacgttgaccaacgacttagagactttcccatttactacttctttttcccggttttctttgaccgaaaagttttaatccacattttaaccggaaacaaaccggttaattcagtgattcttcgttctttagcttttggtttttaaacactcccaaaatcaccactacaacaaaacgctaacgcagaatgccaaactaacgtttgatatttatagaaagttttcaatatttcaaatattgtttgatcaaatacaataaacacatataacaaacagtaaaatctttacttatgtttctcggtttcatgtttgaagataacaaggttttcttcaacaaggaatatacaaataagcatacacccctatatttgttttactcatgtatacattcaattacacatcgaaattatcacacaaagaaaaattgtttcgaattgattaatctatctatcagtatacttcatgtctagtctctataaccaacaagaacatgctattcttcaacattgtctatatattataagccctatatacattatatagtcacagactcagagaggctccacaaacgatttccccaaacataatcctatcacaaattgcggggggcaagagctactagaggcaatgatcatgaggttcgttcatatctccatcatgttgaaggagaatttcgaaagaagcttaggaatttgcgacatgatcggcccataagtctgcaacgcataaatgaaacatcacaacacataattaaatacagcttgattgactgaccctgttagttttaccaggaacatcgattaaaagttcacgatgagttaagggcaatgcaagtaagatagtacataccttttcattttcatggagttgacacaatggaacagcgaggagtttgaagttcttaggcacaacaaactgttgatgtaccggtaatctcacaagaaaaagctttgtgcattcctacacaaaagatgaggatagagcagagcttttagtataagcgcaaatcttcaaaagtctcaactttttcttacaatgaaagtgaaactaactaaccaacctttgggtgtttaatattaggtggcaagaaaggatacatcaatgtctcaaagttgggtctccaccacatcccaatacattctcctacctacaacaatgttgtaattagagagaccattcttaagccagaaacaatcagatacaaaagcactttaacaagaagccatagttcctacctcataacccgaaacacccacattttcgttaaccgatagctttgatgctagtttccgttttagaccttcaatatctagaagattaaggagaaacatgactttagcgtttagaattgagacagcgatatttatgcataaagatgcaaggaaacagcatactaaacctgattctccaggtctcaaacgaccaccaggaagcttgaaaatggagtttctatattgaagaagcaaaacatgaggatgcttgaacaactcaacctgatgtgtcccaacattagattttaatcaatcctttcaaaccaattttccctgtaaaacttttcaaaatccctaatttggctaccaactataaaattaccagaagaacagcttcaacgcaagttctcaatccatgagcagcataacttcaaaagaaacaaaaaagaaactttagctatagattaaaacaataagaaaaaaaccagatgatctaaatcacatcaaaactcgatttacttggatttcaatctgatgactcgatcagagataatctcgtccttgacgcgaagagcttcttttgaaccgaagtagtagctgctaagcgggtataaatcaaccatcaagtcatgaacgacatcgtttcgtctcgtcgtgttgtcactgatctcctccatatctaacgctcgagcttcttcacccattttctgcccgtaaaattcaaagacgagagctaaaagcgatctcaatcgattaaaattaaataacagagagaccacgagagcagagaagacgcaagaagaagagtgaagaaaggtgtcgtagtcggatcactgagacgtggcggctccagagagtacttctccgcaattagctgacgacggcgggagagtgaggaagaagatattaatgggcctgttacgatattaatgggcctttagtagtaaacaagaatacggaacgatgttaaacactctattgtttccaactactaaaaacgacgcgagtttctattttataactaaaaaacgagaatcaaagtctctgtttcaaatttgggtcttttgcttcttcttgctcacttgaggaaacacagtaaaaacctaaaaagagaatgaaactcgcaggtctgaaatcgatcgagaacgctcacgaagattccgtttgggcagcgacgtgggttccggcgacggaagatcgaccggcgttgcttctgactggatctcttgacgagacggtgaagttatggcgaccggacgagctggatcttgtgcggactaatactggacactctttgggagtagcagctttggctgcgcatccttctgggattattgcagcatcttcttcgattgatagctttgtccgtgtgtttgatgttgatactaatgctacgattgctgttttggaagctcctccttctgaggtttggggaatgcaatttgaacctaaggtaattgactcaatgagattgcctccaattttagggttttgaaggattttgggttgttttgtggtgaaagaattcgattgcttcattgaatttcacttcttagttgcgagtaatgcttctcctgatctatataacaatgcttgggtactatatggaattgctgagtatcgtttgaatctgtagctctgatcagatagggtcatctactctgctcggaaaatagatctagatcatcttctgatttttcattgagtcttatatagtagattaagaacaatttattggtgctttgatgataaatcttgatttggtatgatagaattttgacctggtgactatcaagtatcagtgcaatgatctctcttttagtttgcagtggagtttttatttgcttctgagcttataatttcaacattactctttagaatggtgctctgctaacatagtattttacatgttccaagggtacgatccttgctgttgcaggtggaagtagtgcctcagtcaagctttgggacactgcaagctggagattaatctcaactctatcaatcccacgcccagatgcaccaaaaccttccgataaaaccagcagcaagaaattcgttctctcggtggcttggtctcctaatgggaaacgacttgcttgtggttcaatggatggtacgatctgtgtttttgatgttgaccgctcaaagctacttcaccagctagaaggtcacaatatgcctgtaaggtcccttgtgttctcccctgtagacccgagagtcctcttctctggatcagatgatgggcatgtgaacatgcacgatgcagaagggaaaacgctgttggggtccatgtcagggcacacgagttgggtgctgagcgttgatgctagcccagacggtggagccatagcaaccggctcaagcgatagaactgtgaggctatgggatcttaaaatgagagctgcgattcagacaatgagcaaccacaatgaccaggtttggtctgtggcctttagaccaccaggtggaaccggtgtccgggctggtcgacttgctagtgtctctgatgacaagagtgtatcgctctatgattactcatgaacaattcggttttttgacttttttcttttatgcattctccaagacgcatctagttgtaacaatataatctgcaacaggttgattttgaccggagtctttagatttatcgcttacacaaaaaacaaagaagataaaatgattcaaactttgcgatagaactttattggaaaactgagaaacagataaagatcacagagagatgagttgaagagtaacgcaaacaaacgtctaaaagttttcaaaaaacaaaacagctaaagattatggtcttgtctcttatgacgtaagtgtattacttcctaagtaactcttgagaacatccatgacagctccgaaatctgctttcacatcaacaggaggattggagaatctgcaagccatgtcagggatggcattggagtgataatctatcttagactgagtaaacttcaacccatgagcagtactcactaccacagttcgatcagtcggtgcaatcactccttgattcctcagcttgaacagagcagttagagcaacacctgtatgaggacagataaacattcctgtcgaatccgcttgagccatcgcatccatcagctcctcctctgtggcttcttctacaataccattgcacttcttgagagcgtacacagctctatcgatggagacagggtcaccgatctgaatcgcagaggcgaaagtggtacttgcagtcatgggcttgaagtccttccaaccagacttgtagtgcaagtaaagaggattagcattagctgcttgtgcacagaccatcctcgggatcctatcgacaagtcccagttcttgacacatcttaaaccctttgtaaaaggcatagatgtttcctaggttacctccaggaacaatcacccaatcaggaacttgccaatcaaactgctgcaaaatctcaatagctgcagttttctgcccttctaacctcaaactattcaacgaattcgccaaataaatcggcaattccgcagttatctctctaatcagcttcatacacccatcaaaatcagtgtcaatactcaaaacaaacgcaccattagctatcggctgaaccagctgagccatagagatcttgttcgccggtaaaaacacaatcgatgggattccagcggaggcgcagtaagcagatagagcagcagaagtatctccggtggaagcacatccgacaccaaccacaggtcgtttcatctttctcagacgattaacttgactaaccaaaacagtcattccaagatccttgaaacttcctgtatgactaatcccacagtgtttcacccacagatcattcatacctagaaactgcttaccaaatctctctgcccagaacagattcgagtttccttcaaaagctgaaacgatgtcgtcgtcatcgatctcaggaagaacccactctttcttcgaccaaacacccgatccataaggccatgtgcttttaccaacacgcgaatcgaagagatcacgccaatacgcgccatcgaatcgcttcaaagcctccatatcgtgttcgacatcaagcaaaccaccggagcggctacggtacacgatctcgtcgagagagtaagactccgtggatccaggagctgcattaaacggaacgtatttagctgaaaatggattcacggcgttggaacgattacgacgagcctcatctcgaatgttatcctcggtacggtgaggaggcttgaccgctgtctcgatcggggctttgatgttgttgccatcggcggtacaggagatgacgacggggcggtggcggaggagagaggttgaccggtggcggcggatggggtcttgtttagggtttaaggacgatacagaggcattgaagagacaagacgaagccattttttctagagaatgagaagtgagatgcggctgaggattttgaggagaggacacgagtgagagagagagaaaactatattcagatacttaaaccggaaatgtcttagaaccggctagtcggtttaagcttttaggttaattgggattatgtatgtgacgtagagagatattttgggcccattaatcattcaaatatctggatcgctttccgtatatagcaattgaatatttatgttttgtcacgttttgctttaaacaggctaataaagtgcatgttataaggaacattcatgttgatgacaaaaagataaaaggttacatttgacccaaagaaaacaataatgttgaacataaaaattcacataagaatcacgttttaattttgatataacaccaatacaccatcatgatatagattgaaactctagtagtaacaatgtgtaagttggccaaatttgtaatcaattaaatactgcatccagaggaatttgatggaaaatgaacaattacatctgaaagcaacatgtgaacactccaagtatcccatattacttggttcgaattggaaatctttatagaaacaaatatcaatttgaaccgggtgtatatttatagatatgtaagtataaatctgactaaactgtcacagactcgaatttatttgacaagaagaaggagaaagtaagaaaggactggactcaaattctataaaactacacaaaagagaaaacaagtcaatcattgctatagagtaataaaacatctctatacattttgagtaggagagattcaaaaggggacacctaaacgggcggtatgtttgagaaggagaaacctttgtatcctttgtaagcataatacgcaatccgtgtatagtaaaacccgggaatgaacagaagacacccgaggacgatgaagaaaatccctggtttcaccatcaaaaatatcaaacagagaatgataggtcattgatgcaatgatgagaaagaagtagttccggcaaaacggaagaaaacagcaaatcaaatgaaatcaagtttaagtacaatgctgatacttgctttcgctttgcagtattgcattggggatgtatgaaatgcattaatgaattacaagcccagaggaagaagagcaaactagctaatttgaagtgaatctcatgtctatgttacaagcagaattgggatatatcaataacagtatgtgatgatagtgatctaaaaagttaatggaatccaacggagatccttcccttttttatctcacagataagagaagcttagaatcatcatatactagtttctatcggaagtttactaatcattctaacaatgaaatcaaatcgtatgcctttggaaaacttgtgtctattcatccaaatctccagaaaacagagagcaaaaggccaagctgaaacgaaattacactccaccgtagctaaccagagcacttgcaatctatatctatcagcttaattaccaaaattataacataacttcaccaaatctaaaaaaattcctaaaacaatctagctgaaatcaattactgttttctaaatctctcaaactagcaaagataagtcccacatattctctcatgaattcccaatttctactccaagactggatcaataaatgtggaataagtaagaaaggtgaagaaatcgctaccgtggcctcgatcaccgccaactcgattataagccatgaagaaaccggagacaattcctagggttccgaacacgagtaaagccaccgcgagtgcgatctccttcaccggcggtcggttattgacggtgtatgaagtctcaatcataatgtcctcgtccgttatcgagaacgcatggtcgacgtacgccattttacacagcttccggatcaaagatcaatgggaaacaatcaggaccgatctagaagaaagcagaatgacgattgatctagagctcgagaaagatgaaatcgtactgtttgaattttaggtcttcagatgttatgagtctcctacgacggtgacggattagtttggtgcaaatgcaatttcttttggtcgtgaaatctactcaacgtactatgattcaaactacgcgtcgtttgattattcttttctccgaaaacggcagaacgtgcgagtttgaacaaatcaaactaatcagtgggctatatataacaaaccagaaaatactctctgtttttccatttgtttttttgatgatgacatcatgtatatttaccaattcaagagattcaggtcaagaaatcaaaccaaaaccgaaccataaagatcagagagatttatggggaggatatagtttccagagagcaacagttgcatcttcagacgcagacgccattagctcacagtctggagagtaggacacagcgttgcactgcaaacaaaacacatgaaggcatcaaaatacaaagatttagaaaatggttgtctctcaactgttgaaccagtctaagaaattttcacataccgttgctcggtggtactttagtattgctagagcatttcctttgcggtaattatagactcgtattctgtttccaaatatgtaacaaacaggagaatagtttttagtcatatgcatcaactttttttcacactggacgaagtctaattgatttattcatatgttttgtttcatattgtgaaaatcagtgcatagcatgaggatgctaacctgtggtcccaaccagccgtggctgcaattttcccatcgactcgaattgaggtgcccgatacaccgggcctttccaaagtaatctctttccttattgtacaagaaccctacaatcatatgaaaaaatgtcatggaatcagtattaaactatagctttacggcaatcacacaagtgcatcctctctagcagatgtcaaacttacagttgaatggttgagattatacatcacaattttgtcatctgcccctcctgagattcctccatcacatgatgatgcaacactaagacttaaaactgcataaagaatacgaattaagtaatttggaaaattcagagagcaggaacaaaatataagaaaaatctaaatacagaggatggaaacaagacctggctctgaatgaaacttcacacttgttagaggaatcttagcattgcgtatatcccaaagaagtattgaaccatcctcataactgcgcaagtttggaatgaaccacccattataaaaacaaagtatgtaatcttgagatttgtctttcttgattaatggaaaagagcttaggaaagagagcatacccagctaagacatgtaagaaaccctgtgattcaggagggcaaaacaattgaacagccatacacattcctgcagatgaccatatatacgaccttgatgaaagtattttaagcaagttcaaaggtgaactaatttgaaattttttactgatgctaaaaaacatcaattttaacaagaaaatgtacatatgaaggatctcactgaaagacaaatatgagctcacctcttcctttggtagaagcattgggggattcgtcagggctactttgaggaagctgtattatcttgtctccggtattgagatcccatatctctacctttatggatagaccaaatcacaagaatgaaacacaggaaatgaaaaccaataaaagaggagagaagaaacaattttatgacttttccaaaacaaaacatatatgaatttctagtcacctcagtaggttgctcccctactactgctacaaaagtggtaccttcagcatgatctttatctgctaaatttttttgtaatatgagcaataagaagaaaaacagttattttgctaacaaaatctttagacaacgcaagtaaaacataccctgaagcaaaccagaatcctcctcagatcgttcactatcatcagcaatttgaacattacatgtgtctccaccatcctgctcatcacaaccccgtgagtgactttcagcttcttgcagagaattcttaggcttcttaacaagagagaacttgcaaaaatgataggcgcatgtctcaagtattagtaatgggtctctgccaagtatgtcacaagaatcattggttatagacttatagttcgatagaaacaaacgcataaaaagtcgaataagggggagatcatattcaccttgatagaccaccatcttcaatatcccaacacttaacagttccatctcttccctggctataaccatcagagtaactagctcagattttccgtatatagattgattatgaaagcatgattgcttacgtttttacctgataatcttgtcctctcctaaccagggactagctgctacagctaaaaccccatttgctctactatgagccctacaaatcccaatagatacaatgagtgctagctactttataatgatcacaaaaacaaagaattaaaaaaatcaaaaatcacaaaccaagcagaagaaactgcacggtgctgaatagtatcccaaatcctcaactctccatcagctgaactggagaaacaaagcttcaattttgcaccaaatcatcataaataaaaacaataaatgactcgagaatttctcacaagtgagagagacgactaattaatatatacccagtgaaaagcagagattttgatggatggaaggaaacatccataacagagtgacggtgccctctaagcacagccactggatcaggcggaggtctcttactcatctctgattcaactactacacaaaaccaaactcttgtaatagagaaaccaagcgaacacacaacttaatcgaatccaagtctcagactttaacaacaggaacaccgagaaagagaaagcctttgaaactctcccttatatcaaaaactacgtgtcgtttaatattaacttttttctaaaacggcacaatgtgcaaatgtattcatatagcggataacaatatccaagtttccaaacaaaccaactctgaaactgtttcactcacataataagagaacgaagagctaattgctgaagaatccgacgaaaatggctccgagatcagattcacaaaccctagccaccggctccgacgaaaatgaatcctcaatcgatccgatcttccacattctccgtatcatccctttctccttcctccgaccaccacgtcttcgtctcaagctcccttccttcactctcccatctccaatgactgtcttctcactgattctcctcacttacttcctcgtcgtctccggtttcgtctacgacgtgattgtcgagcctccaggtatcggatcgacacaggatccaatcaccgggtcagtaagacccgtcgtgtttatgtcgggtcgggtcaatggtcaatacatcattgaaggtctttcttccggattcatgttcgtactcggtgggattggaatcataatgttggatctggcattggataagaatcgagctaagagtgttaaagcatcttatgcaacagctggagtctcctccattgtgattgcttatgttatgagtatgctcttcattcgcattaagatccctggttatctccgttagagggttagatcacttttggcttcaattctgtaattggatctttagtataagatcgatcattagaaaaaatgtgactttttgttttgtttgtttgctaaagcttatgtgtttcttgtttgataatgagaatttagctttgaatgttagtatctgcacttgcattattgttgaattttgcgttgaagaagataatgggaaattttctgtaacagttatatgacaacacaaacaataaagtagagatttttgaagtttggtttgttggatcgctttgttgcttcaggtgttgttgactaaggcttggaagttgaggtctgcaataatattgcagatgcagatttctaatttcacaaagaagttccaacacagaaatgctatatgtaaaagaaatatcggtcaaaattgttatttatgattttaattacatgatttacaataagaagtaatgaaatctgaatgctgtgtatttacatactttatacatttagtgatgaatttaagtaaatgattgatagattcaaaattgtgtttgctgtgtgcattgttcttatctgctgaaataggttcttggggagaagagacgtcgaggtgagcacgtcacaggaaacttggtggaagttaggatatcaatgggacggtactcaggcatgatgagcccttctcgctcttccctggtccaaacccttgatctgccattgaatgtcccgtacttgactagtttacggaaaccccatgtcttcttctttgctgcggtgttcaccagtttaccattcatcttttggctcagatactctcgcaccgcatgcaagctctgttccacaacctcaatgggtggggagacgagtgggtttccttccgcgctcagttttcgtaggcgcctcatgcatccaatagactcaggcaacactgttatcttgttgtagctaatatccagttcgaggaggttcaggagaagaccgatagaagatggaagagcagaaagatactggaagttctgactgacattgaggatttcgaggttgatgaggttctcgaggtcctcagggaggatcataaggcaattgagacgagcatcgaggacacgcagggaagtgaggcaggtgatggtggctggtaggctaatgagcttgtttgagttgacacagagctttttcagattggttagttctaagcctatgttgtctggtaatctaatcagctcgttgaagttggcgtttagttcttcgagtgacctggaaaatccaaaacaaaagaaaacagaggaatttatcagcattatcatcatatatgattggtttggtccagatttggttgaggtgtgaaacctgcaattttgaatagtttgggggagggaaacgagaaagttgccggagacattaaggatcttgagcttagaaagacaaccaatggagtttggaagagctttgatctggtttgagtgaatatccaatgctatcaagttgagtaatcttgctgttagagattctggtattttctgttacaattcatagacaaacccccaaaaagaacattagaaacgtatattctgactgtgtatgagtgtatgcatagagatatgaaccttgatatgattgttggagagatcaagcttgcaaatatttgccaaattgagggaaggatttgggagagattgtaatgccatgccactcaaattcacaacctctagtctctcttcctcgttgttattgtatgatggtgactttggcgataaggatggtgaaagtggtgatgatggtggtgatgtactcaagtccatcatcatcattgtcatcatgtgatccttttgtccatgtaattgctgatactgatatgcatcttcgcatatcatcgttttatgtgtgtttgtatggaggaaaaagatgataatggtgaaatgatgtggaatgagtgattcttgatctgcttataatggcaacacagagagattaaggaggttatgtatggacgatcaaactttagtgggaaattgaaggaaatgaatactcttcggaaattaatgatttgtaattaaggaaattataaaaggtgattagctgatgaaggagagatactcatgcgtcgccaagtttttctaaacacctgatcgaaaaatgttagagctacccgcaaatcactcataagtaaaaaaataaaataaaaaagttcccataaatttcatttcaactttgagactaattttataatcagagtctgaaatgtaacaaatcaaaatttgtggggttaaaacagaaataattaaaaatatgccacttgtaataattccaaagcaagctctggtgacacgatcatcggaacaaaatagagtacccggtgacgatgatgaccacgttaacggcgacagtgccggaatttctacccccgtcgctaaaatccaccagaggatatttcaattctcatagtgaatttggcgtttcaatctctaaatttagtcggagaagatttcacaatccgaccagagtcttcgccgtttcagatatcagtaagctcgtgacggagtttgatccgaagattccattggagagagcatctactccgccgagctcgtggtacactgatcctcaattctacagtttcgagctcgatcgtgtcttctatggaggatggcaagccgtaggttaggacaattcacactcactgagtgttaaaactgtttctctaaagtttttaactttagctattacatatgtttcaggctactctgatcagattaaggagagtcgtgactttttcaccgggaggttagtaaccacatgcattaagatttgttcaatgtatgtatgagaattttgtgagaaagatagaaacattggtgcaggcttggagatgtagattttgttgtgtgtagagatgagaatggaaagatacatgctttccataatgtatgctctcaccatgcctcgatcttggcttctggaaatgggagaaagtcttgttttgtttgcctttatcatgtaagctccacgatgaacttgaaaccgtaactcaactgattatgcgctgaatgaatacggttttgagtcatgttatgtgattctttgtggcagggatggacttatagcttgagtggatcgcttgtcaaagctactagaatgagtgggatacagaatttttctttaagtgtatgtggtctctcactttgtttttgttttataagacgatatagtgtgagttcttacatttgactgtttaaggaataggaaatgggactgaaacctctaagagtggctgtgtggggaccttttgtgcttctcaaggtgactgcagccacatcgaggaagggagaagttgagaccgatgaattagtggcatcagaatggcttggtacttccgtggggaggttgagccaaggtggagttgattccccgcttagttatatatgcagacgtgaatacaccattgattgtaattggaaggtgaaatcttgttctgactatatacccttttaaaaacagaataagaaggactggtgatgaatggatcactgaaaacttttgcaggtgttctgtgataactacttagatggtggctatcatgtaccttatgcacataaaggtttgatgtcgggacttgatctcgaaacctattctacaacggtatatttcttttggtgaatctgaactagggccaaaatctgactttcagcacatgattctaatctttagttagttgcttcttgtgatgaactttatggtttaagatatcagatattcgaaaaggttagtatccaagaatgtggaggtggttcaaaggttggcgaagacggttttgataggcttggatctgaagctctatacgcgtttgtctacccaaatttcatgataaataggtaacatacatcaagtccattgctcaactcaacttccaataacttgactcgactcactctgcatggtttatgtttaataggtatggaccttggatggacaccaatctagtgctacctttaggaccaaggaaatgtaaagttgtcttcgattattttcttgatccttctttaaaggtaaaacaaaccaacaacattaacctatatttgtcccgccctgtatttatagcatggagtctttgaaatcttcttttggctttaggatgatgaagctttcatcaagagaagtttggaagaaagcgatagagttcaggtacgataaatgaatgaatctcattataccaaaaatagtgccgcttaaagagacataagtttgtgtaagttttggtgaatcagatggaagatgttatgttgtgtgagagtgttcagaggggtctcgaatctcaagcctatgacaaaggaagatatgctcttgtggagaaaccaatgcatcacttccattgtttgctacatcacaatctcaaactgtgaacatatatgtatgtatttatgtgaatattctacagttctactctctctgcaccaaacataaaatgaagcctctttgtatagagattgcttttttacttgggacacaataagtcacttcgtttagattactccggactttgagcatttaaggattaacgtaacaagcttaaccactaaacaaaaataggtttattttttatctgtattaaaccgaagatgccgtttgcgaaaatactgagagaaaagaggtaaacgtattcacaagtaccactaaaagccacctttggtattaaactgttttctcttttcaaactaattattaacctgaaaatcaacagaaaaattcaaagttttagatgcgtttagtggcttggctaatagcgaagaaaaggtaacttaagtacctgatgagttccttctccaccggtttattctaaagtattgactaaccggagtttctggaaccggtatcaattttccgatcaccgccaaaggccaactggttacataacataaaacagaatttatctggtaagcttacgaaaaaagcatctactaaatcttgttttcaccaactcaaaactctttgatgacaaagttaacaaacaaacctgatagaaccgattccgatacagacgagccacatctcccaatcaagcttagtcgttgaggcaaatgttccaaggaactcgacgatgactacctattaaacagttaacaacaaagcaataaacggtatgtcttatgtattaagtgactacatttgctttgcaggaacatgtgagagagaatcagtacctggagcacaatggtgatagagatgatgcccacaaaaaggtgattcctgagaactcctcggaaaatgtttatttcatctggcttccgtgcattgaactcgttgaatacctaacaaatttaacaatcagtttgttttctgtcgtcccctagcctttttatacagagaagtcagtatcttttacctggcagatgacaaaggcattgaagatgactgtattcttcactctctcagcatttggcttactcttcagatgcaggatacttattccacggaaattgaggattaacaagactgtcacttggtacatcgcctaataatttgcaaaacagttggagcagcagaaaaggcttaaccattgtgttcttagagatgctagggaggtaagaaaaagaagaagaggataacttacttgtataaacaagtttctccacatgatatttgtgatgagaggttctctgagagcaaaagataaatccaattattgtgcaaattgaagagaaactgagagcactctatagttgaacaagacttaacacgcatgctcaagtctgataagaagtggtaccttctgccaacaggcgctcgatccattaagtgatcggttggtggctcagtggctaaagcaagagccccaagagtatccattataagattgacccaaaggagctacataggtaagggataagactttttaccaagttctgaagtgaatacttttgtgcagatgagaaagagagagtataaaactactatttcgaacctgtactgcagttagaggaacttcacccgcggatatggcagccaccacattgatgacaagagctgcgacattaaccgtgagctgaaactggatgaacttttgaatattcgcatacacagatcgaccccaacggacaacctataggaatgagacgattattaaaatggatatctaattcaggataattaaaaagatcacaaatagccccaaagcccaaaggaggacatttacgaggaaaagaaattccaaaagtatcacgcaacagaagagtatcaaaaaggagcttcttttataagaaatttgaatccttggtttctaaggatacaaaccttcacaacggattcaaagttgtcatccaagataatgatgtctgacttttcctttgcaacttcggtgccttggatacccattgcgagacctatatctgcctgaaagttggggggcaacacagaaagtgtgatcctcaataacagtgtatttttaaagcttacacatacgaggaatgtaaatgtattgaacctcgtgcagtgcaggagcatcattggttccatcaccagtcacagccacgacgtgtcccctcctcttcagcgattgcacaagaagaagtttgtcattgggtgatgatctacccattaccttcaagtttagcaacaatgtcaggtaccattaaataatgttcctcagtcacaaccaaaatcataaggctcttacagatatctcttcacaaatcctatctctttcttcttctgaataggatcgaaatacttttccttcaatcagattaggctcactagcatctgagtctgaagctaatataccacactccagtgcaattgctttggcagtctgaatgttatcaccagtcaccatacgaacctgaggccaatagtggaattagaagactataggcctatgaagaacagagaagtctctaaaaataaactaattattgagagaaatcctcaggggaagaagtaaatgagatatctgcggaccttgactccagcttgttgacacagtaaaactgaatttttgacacctgggcgacatggatcctacaatgtattggcagaaaagaacttcaatgaatggcccatctggtatgaagaaccatataaaggcagatcacaagattattcaaaatggcaaaagggaactaggaatatgcttaccttaataccaacgatagccaacaatataagatcatcctcaggtaattcccatctagagagttgctcttcatcagttggaatcttatccgcttcaaatgttcggaaggcaattgcaacacagcgcagactccttgcagccatatcatcgatagcatcttttaacccacccatctgaaacaacaagacttatactcagaataaaaaacaagtatttctatcaagactctcattaccaaatctggcactgatttggacttgcagtatgacatggtcttgagtcaagacacaatgataagttcaacattcagacaaactctatcatgataaagagaaacatagttactgaccttatcttcactcatatctacaaaactctcactctcatccatatagtgcgtgcaggatcccaaaacaatttcggcagcacctttccagtgaatatggacactcgaatctggctgaaaatgaattagaaagtcgttaggatgctgattgacaagtagaaacaacgataagagaaaaatcaaaaacaaagcaaaagatctacaaaaactatgggaggaaatgaaaagaaaaaacattactgatttcactgctacacctcctcgtttcttctctgagttgaatggaaaaaattgtacagcagaagactcagacttaagagcatcaaaatccatacccaactgcagtgtataagaaattaaaagattagttcttctcacggctatatatacgggaaccagaaaatgtagctaaagaataaacctttatcgcccaattgagaattgctctttctgtaggagatccagaaacctgaatctcaccactctgtcatcagtaaagacataggcattattacattaaatcagctgaagtagaaaccaaacgggaaatcagtaaagttccaaagaattttaatcctacttcagatcggaacacactgccggttgtattgtgagcaataccctcaacaagtatggatgtaaaagcagatggcaattttgagctgctgtcgggagaatccatcttttgtaacccagcataacactcaacaacggtcatctgagaaaaaagaaagtcgtaggggacccgcttgttgggtacacaattcaaaatagcaaaagctcataactaggaaagcacataccaaaactggtaagtgttaagtgtgttagcaaatacaaaaagaaggcagagcaccaagattcacctcgtttaaggtcaaagttccagtcttatcactgcaaattgttgttgcagaccccatggtttcacaggctgaaagcctacgcacctgaaattaaaattcgtttaagttgcaaaagacattcacgtataagaattttgcatttatgttcattcaaacttattgagtcccaaaaattaaaatatacataccaaagctttatctgccatcatttttctcatggaatacgcaagactgccagtaagaagtagaaaagatcagtgacaaaaagactattcaattttacagcagatccatcattttctttaaagtttgactctgaccatgtaataactaaattctttccaactctaaaggccaaagcaattgctattaaaatatgtatatagaagacaatagacttacgtcaaggtaacagctaaaggaagcccttcaggcactgccactacaacaattgtaacctattcgacaagttgagcagaacagccagagatgtaaataagaagatgacaaccgtattagccatgctaatttcttctaaagaaacacttactgcaacagtgaagatttcaacaagatcatctagcacgtgctcaaattttgtcttccctccaataaactgtgggcctccctgttcattcttcgtgtgaccggtaaagtaactgcatagaacaaagattcgttcaataatcactgacatccactccacacggtactttagttgtcataaagaaatttaaacgcaccggacaactaggacaaataatacaacgccagcaactgtgagcccgacaatcccgataaatgttgctacaccattcaagcgcacctgaagaaagcatagtacggatgactattgagcaacaaaaaccacgaatatatgaacagagaaaagttgatactcacctgcaatggtgtttctccaccattgtcctctgagacgctagccattagtaagccccattcagtgttgacccctaccccagtaacctgattttcaaaaaaaaaattacacacataagaaatgtgggaagaaactagccaaatcagaagttttgaacgccataaataaaaacacgtttctgctgcaacaattcaccaaccatggatatctttctttttggtgggaaccaactacggatatcattgttcaccaattaaacatctcataattttttctacagaaactacagtttacagtttgtttgagccactatgtcacagatagtataagttaatgttcgttaagtcttaccaacattgtcccattgccatctgcaactttacagccagacattaggaatggatgcttagtagagtttttttgaacctgcgagaaacagctttttcagaacacatgaaatgcaaagatggtatttgttgcaaatgctaaggaagagaataaagtatacaattttgctctctccagtcatgctggactcatcaactgcaagggaatgtccagcaactaaaactccatccgcaggtacctatggaaattattggcagatcaaacataaattatagctatactgaaattcggaaaagagctaagaaatactgcattgacaaaatcatgaaacttgcctgatcaccaatattgaggggtatgacatcgcctactacaatgtcataaattgaaatctccactcttctcccatcacgggttacctgcacatatacacgatgcatttttaaaaattaaaccaacaaaaatggaattatctatgagctgcatgatcaaccaagctctcacctctagacgtatatttcttttctcttcatttaagttctggaattgaagagattgccgataatcactggtagctgccaagggaagaggtatacaaattagtacaatacacgcagcagtcacttgtatgagtgaaatcagcaaggaatatcaatacctgtcaccacaatgacaagaagaacggcaaaagcaatgctgataccatcgtaccatcccttttcgataccctaagaaggcagccaaagaggtaccaaaagctcaggaagaacaaagaaaactgtgaaactttggacaatggagagagaacaactttctgccctcttagagcaggaaagcttagaatgagtacaatgacaaagtaaaggatagtcaatagacgtggtatcgagcgtcaacgatatggacacgagaaagacataactcattcaaatactgaggtacagaaactctggaagtcttgtttctataattattcgtcgattgttctaaagctatgccacatagaaaaaggacttaaaattttcaaggtaggcgctgagccaaatatactgtattagttcttaaattgcatacctcggtctttattcccaatgccaaagaagcaactgctgctacaatcagtatgatcaaagtaagatcttgagaagcttcccatacaaacctctatcggacatgaggaaaaaaaaaggaaggaacaaaatagtaattagctgaaaaatctcacagttaatggaaactgctacaaagcaaaaattctaaagtattaatacccagaaactcctccctttcttctgagggtatgtgtttgatccaaaagcagatttccttttcaatatgtcatcatcatccccgtgtatacccttctccaagtttgttttcaacaggtcagataaccctcttacctaatgaagtaaacaagaggataaacataaatgcataagtttcatggctgagaaacaattgctgaagaaaaaagtaacagatcagctaaagcaaagacatacccctccaagctcttgaagagctcctatattttgatcccttgatattgacacaatctgctcctgtccgataccaaaatcaccaccgccaggagttggaagtggacttgcaattcctaaaaagagataaacctcagtcaactacagcatcaatcagaaaaattatgaaaaaaaaatccttacaaggaaaagtaataacccaagcaactaatgtaagtgaataagataacttgaattgaaaccatcaactggttctacaaagctatccaataaatatcaaggtcgcaaattgacagtgagtatactatttacactacatataaaagataatcaactcaacccattgcaatgcagatcaatcacattttgtaaaatatgagtcaaaacaaaaatcatccagaattttgactacacacctaaccatagtgtcagtcaaaatcgttaatgcatataaaacaaatggtataaaattaaaaatcacttaatctctatgaaaatgaaagagaacatatacatgcttcacaaaatgggatggagagaagaaaattaaggaaaagaacaagaaaatgaaagaaattaccagtcacgcggcttgcagctgctttaaaaaggtgtgcagcctacgaaagcaaacagcattgataagacaccactaagacgtttatttaagtaaaacttactagcgaggcttatatactcttattgcttgggcgtgcgctctcatcttcctcagcatctgtttcttatcttcttccctttttaagtccagcgtatatcgaaatcgacgagaagcattaagaacaagcgcagcttgctacaaaacccaaattattttccagaatgttaaggaaaagaacgtcagaactatctggctgcggaaaattgcaaaattacatcgattacatgaaactaaaaccagataaaacaattactaagttcaattcaagaatacaaacaaaacaaaaataaaagcattatgcagtcaatgaaatgtcaattcgaacccaaataagaactgcaatacaagcaattaccctccaacggcgtagccgctccactggagcattcttagtactggcaatgtcaaacggactatcttcatattcggtgaagctgctggttccagcctccacgtccttgtcttcccctcgtggagaattattgaattgtccactcatgactgtcgcaggagagatagcaacacgctcttctttaagctaaacacatacaaaagagaacaaaaaacgcatcccaatcagaaacagtacatagccttgagcattctcttcttcctctctaaaaccaatctcagtccaattcaaaagtcactaccaaataaatccaaatacgattcgagacaaatctcttatgaacaagtctcacatttcactgttacgaagcagtaattaccactcctcgccaaattatgccacctaaaaccaaacaaccttcgaaaatccgttttccgatagatacactgaaacgaatagataccgaaaaatttcccggaaatttcaaaattcaaaacgaagaagaagaagaagaagaagaagaagaatctagctcagtgaaatattagttttaggtgtaggaagtggtccaacaacaatcgtgtagggtaacatcgtaaatcgtgcgaaagcgcaggagagattcgaataaacaaacacaaagtagcagaagcaaaaaggtaaacaaagaggaaaaaaaaagagaaaaaaaaaatctctggcgattccagaaacaacaaattttctatagttactgttgaatcgaaaaaaaagaaatataatataatcatctacctcaattatcggcggaacagaggattttctcagctctttccctttgatactctctggctgctgaattattttccgtcactttctcgagaaaatagaggaggaacgagaggagatagagagagagctctataggaaacttcctcgaaggagctttgactcgtcagtcgtcactcgggggcttcctcgtgatactatttaaaatttaaaaactttttcaaaacaaataaaagatttagtactttaaaaaatgacaaattactacatcaatcaaactaaatgcttactattaaataattttccagaactatgaaattatgaagtttattgtccgatttcggtttcagggttaaaagtagaaagaatataaattttaggtaagttaacatgtcttcaaacagtaatctctttacaaaaatttggttcaccagactcttgcaactcaaaattatgtgatgctacattaatatcggctaaattaaccactatcacatcttcaagtgacattgaggatagctatttacgtttcaaaaatgttccgtatgcgaacgtcaaaattgtctaaatagtcagtagtcaatacgctctctaaaataagtaactaaataaaatattcaaataaatatcttcagtataaaaaagatttgtataaaagtcaatatgttagctaaaaagtaccaaaaatacaaatgtatgaaacacgctgtttctaaaattatttaagacttgaatatattggtctactgccttttaactgataaaaagttgaatagaaagaaaagcatgattatagcattttacaaacaaaaattctgttcggattattgttgcttgagcttttgtaaagtcgttttaaaaatttcaagataaatactttcagttatgaaaataaaatatcaaaaaatattcagttttcattctccgttatttattttgttctatcttttcttatgtgtagatcatttatttgatggttattcgacgcacttgctgttgtttgtgtggctaaaatgacacatactggacttttttgtttttcctttttagtatgacatgatggaatgttaaatttataatattttaccttgacattgtagactctagctttagaccatagtttccaaaatccctatcctgcacgctacaaggaaaaaaaaaaggttcagcaaataatatttgactttcatatattcttcacgaaaatggaacttgagaagataatttaaatcatggtaagaacataatggtaggttaggttatatagacattcaagcattcttggaattatgattaactaatatttcgtgaaacataaaaaaaaaactaataaatcaaggtcagctgataagcgttttgctgatattctgaggtgttttaacacactcatatagtcatatttatagattaaaatgcagtttgaataagttggttattaagagaagtaaacaacactttcatgtaatcatgttgaaaataaacaatggaggaaaagcttgaacaagtaaattaaagaccgtcattttatactttgtgacgtactaatgttctgaattctgcatacatcattgaccgatcacgggagtattagataatatagattaatggagactatattatgttcaatagtttatgacttaatcatgatttttttaattcgtttaaaagtaatacgttttttatttcttcaactaaataatacgagtgtacgacaattgttaggtctagacgtctatagtctaaagtttgaactgttattcgcggattatagtattatctagtaataaaatttgatatatattgaactttgagcaacaaagcatatatatttttcatttgttaatagtggaacaacaaactgtaaattttaacgtagtcatctattcaacaaaacttttgtttggatatctatttttcacaataatagtgtattatttcatgtggagcaacgtagaacagaccctatccagtatccatgtgagtattttaaagttaattatacagtatacgattcttacattggttcatactattatacttctagattcaccttacatcaactgttgatgatcagcaacaacaaggaatatttacaatttccaattttccatgagagaccatattcctcatagaaataaaatagagctaaaaggtcaaaagaatctgcaaattaattaactactaataaagttttaagaaagggccaacgctgaatgagtcaaaatcaaataccgtcggcatcgtcggtgcgattaggcaccatgcacgcttacattttcaataaaacggcgaggacggtgattccaaacgccgtcatttttccttttatgattttatgttgaaatatatcgagaaaatagctacaaagcaaagatttgcagttttgcggcctagacatttttaatgtagaatttgggaaaaagaaaatcacgttgttccatctgtttttttcacgattttgtttggtattttacgatgttgtaggaccagttttgtagtcgttaattgggtacaataaaggaagaatgattgattgggttattatatgaatgagtaattgacttggtatcaacaaagctcaactttaatcaagaaattatgtttgattgggttattatgtttgatgttgagcgaaaaatcttgcataaatagtgtgaaatataacacactactcaataatgatgttaaaattctcgctatcggaatatggctctgagaagcattgaatgcatgcacataacgaacggtgtggacaactcataaatccatcgttccaacttccacgttcattatcgaaaatataaagaattagttatcatgaccagtaatagagctgatgatccggtgaatttgcagatatgtggttgttttgcaaaaaaaaaaaacttaaatattttctttttttttgcgttttagaaatgtaattctctgttgatcaaatatataaatgattctctctcttttaaaaaaaaaacgatgttatatggtcgactattttcttgtttggaattataaagtagaggaaactaatcaaataatgtttgcttcatattcttatagagccatctatatcaataatgatagaatttggaatcaaatggcatgtcgtaccatgtagacatgtggaagaaatttctaggaaagcacatacacttgctcgtgaatgtgacatccttactcttatcatatctttatatataaagactcaaaaactactctcttttttaggtcgtcgtcctaaattacttatttttaagactagtcaattataagtctaagggtttgagtaatccataagtgaggctattagtcaatttcctaagttggtacaccaaattatgatattatttacttcgggaaaaaatgtatatggagatctctcatgtcatatattggatcaatgatattatgctacagtttagtacagttcaaaatccgtaactaattgcaaatttctcggcccaaaaaaaatgtcgttttcaagaaagcctaaccatgccgttttcaacaaagcaaaactagaacaagaaaaaagtcaacagttaagaacctaagttaattactcgtgggcctgttaagatcagtctatagtctatatgaatgaagtttgtttcgttcagagcccaacaaatcaaagccacgaagggacatgttctatcatattgggccgattaactaggaccagtaatctcgttacttatcgttgttgaatattgcacccatgtggtctaaaaacgaaaatccccaaacaaattaccaaattcaaaccattctttttaatgattcaaaatagatcgtgtgtatgtgtatatgcattttctctagtaatttgcctaattagttagctttactttggaatgaaagaaacttactaaagcataagtgaaacctagtttcattttgttcaaaatgggtttgattctatgtccaattcggactctcgaacaagaagaaaaacatgaaaaaagtcgatccgacaaaattaacgttaataacggaaaatattaataatcttgtgattctgcagttactttattgtaaatgatgtgtgaaatgttgatcttttatattatttgctggacctaaatcctttactatactttaattaaatccacaaacacacgcccgagaatagaccaaaggtggtaacaacctggctaaagagctctcggcaaaatatttatttatgttttgtgattctattttatcaccattttatgtatcatgtgtgtgtgtgtatgtatgtacgtcaatagtcattgacaacttgattataccataattttaataaaaataaaaaatattttttgtttaatcttatattcaacagattgtttataaatgatttgaagatcacgcaatagcaagaatgagaagggcaacgtattttttatttatgataaaaagaagcactacgtagttaaactagctagcaccaatcaatgatccataaactgttctaaaacataaaatgtacaactttcaatcgttgtaatcatatgaaccgtcaaaactatgaatccggtctgagtcgaatgaaagacctgaagtgatcttgattggtgattggtgactatgatttgtgaaaggtactgattgtgatttgtgaagggtaattgtacgtgaaagttgaaacataagtatataaacatttcgtaaattcgaatgttatactgccacattgaaaagtaaaagaaatggagggacactatgtgagttcggcttttcgggcacagaaaagacataagacaatgattttgagatttgaatatcaaaccttatctactgccaacaagtcttgatggtatgggtccaacaatttccaaaatttaatcaaatatgtcttcttacaaagtaaaactaaaccggaaatcaaaattgtttattagccgcagttatcaaatttccatcataggagaatactttttcgagtagaagaagattcgtgaaccggaagaagattaactatttaaacatatgtgaaataaagtcaacaaaaaatcttcatttttaaccaaagaagtgttataagtttttttcgagtagaagaagattcgtgatttgttcgagtagaagaagaatcgttgatgatgtgtatctactatctagactagaaaacgaatacaaccatcaataaaagaattgctagaattttttttagccacagtaaaacgtttagattacaaaatactcgaatttttaataggtttcaaagattagtatggattttgaccaaaacaattctacttgggtactaaagagaacaaccaccgtgtgagaatattcaattattgttatgattttgttttaaattcgaaatatgataagatctggaatagtacgtctcgaatatcaactgaaagagataggtgaagattgagggagagttgtttttgggcttatccaccagaaaaaaatgatcataagtgacagcccaacacctgtccacctgttcttttctctgtcccttttatcatgtacatgcgattccagtaattgttattcaatttctacgtcttgttccaccaccaatacattattataaaatatctgtaatagatcttacctaaatcatcaaatacggaaagtttctagtgcatttaagtaagacgttgatatgtatcggcagttctggatatgtatcaaagtataccaaacaaagtactaataaactatacgtttatataaagttaggtattgattattgactgtagtagtaatccattgattacgaaaaaaaactaaaagttgaaacaatgtcaacaacaacaacaaaaaaaaatcagttgaaagaatatgaagatgaatttataatggtatcaactagagcaactagaccaaaaaagatatgatataatattagaggtatacatgactgattctctaattgtatacagcatgagcatcatcggctatcttaagtatcttattgatatacctaacagtgataattaatggagattttctaacagtattaaagtaacaaacatctggtaatagctagctagttacatgattaccgtagattcatgtcaaacaaattattcacagctaacaataacatcaaactgtattgatcaattaataatactctattatgttgtcccgaaatatcgaaaccatcattacgtgcttatattattcttgacaattataagtatgtattagacttttattcttaccatcaatatcatttacgtatatttgtctatattgtttgtatctgatgtcgataacaatttccaattggactcaaaaaaaatttttaaaaccaaaaaaaaattcagatcaagctcaagatctaagaacttattgttatcatgtaataaacattgttaaacatcaaaatactgtcaaaaatatgtacgagagattttaacttgctacaaaagaactatgtacaaaaacaatatctaaatcagcatctatgtacaattatttaacttgttttacaaagagatgatgtgcggtgtagaacggtccacggactatgccaggattggatatgcttagttgcaaaattctttggacctaacaacactaaatgaaataggtttacagaagttgtttctgctgatctcagtttagtatatcagtatatgttaaataagttataatagtctttggcatattatatgttgaatcgaactttagcagttagaataatctcacacccaggatcttcttaattttccatggattcggaaaatatcaaaggaaatggaatcaaagtatagagatacttgagtatgcaaccgagtaagaagatgaaaacaaacaaaaaaaaaatcagtaagaagattaattcatataccttttgtggacacacaaatctattctaaaaacaagtgaacgttaacgatacataaattgtagctctttggaccacaacaatttttgtagtctatatcatgtcagtcgtccagctaagacgtacagcaatgctttggcctcattcatatacagaaaccctcttatcaatcactcgtatacatagtattttttcaacaattatctaatagatttcatgtttaatcttgcgggaaaagtaaaacttaaagcatagagttctcaaatttcatacgttcattcgtctccacattgtatacaactccaaaacatatagtaacttttacccataaacttatgatgttcaaattagctatggttcatttgcccaaatttttttattttttatatagggttccatgtttacttgggttaaaatttatgtttcgagtaaaataaatttggtgtttaattatctcttgaacatcataattttatgttttagagaatctataattatggctgggaatatgtttatagattctatcattggtaaggactctttttacttgaaacataatctttatcaatgacttaagaaaacctagtcacggtgtatgaacgcagttagccatatgagaatatataactaacagaaataaaaagagatttatttaagaattgactaggaattaccaataaattatatgaaaatagaatagcaaagtaattcacttaagaataacaatctttattaaacaaatccaacaaattatatacattgcacaaaactcagacgagaaataaagaactcaatgaaaattgaccaatgtcaccactcaccaacacgagagggcgtttctagcaaaatcagaagtcacaagaggaaatctgcaaaaacctcaacattgagaggagaagcaaccaaataaatgaaagagataaaacaatctttttcagtttctcctctgtttcttttcttcattctttctgttttggtttttctctttacttcaatttcgcatctctctacgtgtttcttcaataatacaagacgagatgacgctcgcacgaagaacatgagtatttgcgtttgaccttgaaacaaagtggtaagaaacagaacaaccacttcgtctctatatccaccgccgatacttttccgccgcaataaggacacatccctggtgcttgttgccgaccaagctccgtcttctcttcatgatacacaacttccaaacacatttttactcacaattctcagacttcctttgtgtcttatctttatagtgtttctaggcttggcttccttttttctggtacgttagctaggaaaaatctagaacttctagaagtgtggagaagaagaaacgaaaaggatatttttattaccaagaaaggaaaaaacttatttcaagtgtaaagatgtgtttttcagaaagacttggagggtttagcactacaacgaccatgtacttatagaagatggaaggtggatgacgtggcaaactctccaacgatacaatattttaggttttattttaaaaactcaagtccttgaaaccaagtttataaggtgtagaaactatctgttaatgatatatgcgtaagtgacaggtttcacgaaacataaatcatatattgccaaacaaaaacttaagtcgacaagaagatgggaacaaaaacctcactcgttttgagagtttcatttgcttaacagacacgtttaatcttattcttaggtttcaaaagaaatgaaacaacctaactaagatagattccgaaatcaattgccatagaaactctagtaaaaatgttttaaacaaatttttacagaccacatagttaagtgggaaattgcttcaaatactatgaagtttccgatacatccatagtacaatacaagaactaaattaagagtgcaccgttagtttcttcctcccaaaacatttgaatttcacattttcatcatcttctgtacaagtatttggatagtggaaagctaagactttttgcaacctataaacacatatcagaggaaaacaaaaacaacaggtgcatcagaaatttatttctatcatcctctgttatatgaatttgagtattgcaaataatgagttaccttctgagccagatcttcagagaccatagaacggtacctaatagaaccttctaatgggcagcttccgcttttgattaaaaagttagcatcacatagacttgacacttgcagcagaatatcagacatcagattgttattctctttgtcgtaacccgttgtgttttcttcttcttcgtcctcttcgccaaatgaagaatctccaacggaggcaatacattggaatatcgccaatagtctttccagtggaaagcttccaggtcctttcatgactgcttcctgctctgcaatttccttcttttccattgatttctcagaggccctgaggaggaaacaatatgaagaatcagatactgtatgcaaatgcatcatgagaatttcactccaattaagcaatatccaaatgttaaatatttttgtagcttacttccgctttcttttacgattatccattccccctgtggagtcaaacattgacgcgtctagcgttgctgggtttctcgaagcgagaaatgccgaaagaagaagaaactttgctgaagtagacatatggaagtccaatatttcaagttcttcacggttttcagaactgtagctggctttctgccttctctcgcctctggtttcgccatcatgagggtgactagagaccctgaatatctcatttaaacaatgagcaataagcggcttaagatggctatatagccttctcttcatgtcttcatttggtgaaatccctaaatcatcaagtggctcacaaaactttctgaacaataatgagaaggtagtagacagttcctcaactctcctggtgactctacagaatggtttcaacacaacgctgtttgacaccaaaaactacatcagtacacaatatgagtaaacgatagagaaagctagtagggaggcaaggttgcactacagtcttactcaaggaatgcagagtacaattttcggttaggttgatttctcaagaaaatttgacgaagatcctcttcagaatactcaggaaaataaagaggtataggatctgtgtatcccatgtttgagtaatacacatctggtggcaaaccactgataagtattataccaagttgaggcatcttcaaaacagtatacaaactgaaaagaaactgcagaatgatggtgcctttatcccagtctctgataagatccacattatcaagtattaagtacaccatcttccccatgggtttttcatccggcttatctgatcttgaggtttcggaagtagactcgagagtctttatcacactactaagggcttcacgaagcaagttgacaaaatcagatggcttgtcacatcgtttcgcactagaatacccgtttaaagaacacttcctatgtagcaacgactgattcagaatcgactcaaacaagatacggggattgtaacacgtacgacagcttgaataaacaaagggacgattgagatgcctgagcacctgaagaacaacactggtttttcccgtagaagcacctccatagatcattattggaagagtagggcaatctaacggccccataagtcgaataaagtcgaaaatctgagagcgtctgcctggaaaattagatagaacagcatcaattgtgattgattcttccccaaatgtgagatcatcaatggttggtgtgtgggattcaataggttctgagttctcaacagttacagaagctgatgacctagtgcttcttcgagtgactttcgaactctcctctttaggaggcatgttcttaaaaccttgtgtcaaaatgaaacaagacattggtgaaaacaataaaggatgatttagatttgggaattcaagtaggtgaaacatacataccacccaaacaactaaaaaggaaacacaaagcaaaaatgaaacagtttacacagaatgtgagtgataccatctcaatatgattcaatacaagagataccatctctaagactagatacatagaatcaatttccagaactgaaattgaagcaccatttacatatacagctatatcaaaatgatataactttaactcaagggcttgctttttttcacaagcacaaaagaaaaaagttcaaactttgggaaatcgtctgaatctgaagagaatgaggagtagtcacagcaaagagagtagattcttaaaaacaaacaagtcaattttgaatttctcacaacttcaatcaatcccagattcacaaccattcatgaatcatgaccaccgaacacgatgaatacaaattgaagaactaaacaaacaaagctatgaaattagagaaaagagagagacacgttaacgaggatactaacctgcaagtctccgattcccaatcccaacagaactaaacgagaaaagaagataagaaacaaagacaaaggacgttgtcgtgctctgtgtgcgtcagtagtggcgattcactgagtaaaccactttctctcttcttcttcgttagcgccgatttcatgtttgtttcagtcttcgtagacgaagccctacagaaaaaggccttcaattttttaggcccaaatcaatgtcttcagtggactgttatgtgggccggcctgatatttgagtattatgatttacaaaattcggttttaataagtttcaacaatgcgccataagaaagaaagaaaaaagtcgttataaaaaatggttagtgggattcggttttgagataggacaaaggtttgacagttaaagaataatttaactcgtagtagtgtcgtaggagtaggacaatagagagcttttttcctaaattataatatctgattatcttcaactttatgaacttgtttatataaatgagtccactaatgggatacagatgttttgttatatcaaacaatggttttaaaacgggagaaagtggccatttccgccgtctgataccaatactgtgacttgagtattattacacctttttggtcaaaattatttaaattataaatacacacaaaaagttggagttggtttgtagtggatagtatatgtgcctccacgtttaatcgacaattgaaacctagtatttaataaattagaaaaatatatattttagtctattatttcgttttctataatatttagtcacacaatatggcattttagtattgttaaatttctaaaaaaaaaaaaagaatgtaaatgttgacaaaaaattttattaatacaccttcatattcacatacacacaaacacaccataatatatatatcaatctacactgaaatcactaaaaagttcaactacttcacatgctgatactacaacactagtcttttgttctttttacggcacaacactacactagtcttttttttattgtcgacgctacaatcttatcagttacagtatagatagatgtaaagggagtactaatatcagaagctgttatatagtgcaacgcatgaaaggtctacaaggtctataactaaacctaatttttataaaattgaaatgctaatcattgatatgacaattggtttgcctaacacatacataattgataatgattttgtaggcatatgttatccattaatatataacaattagcagtggaggattagatgggcatgcaatgcaaaggtgttttagtgtcataattactagatatatatagacacatgaatattgggccaacactgtcttgagccactctttggcattatgacctttccactacaatatgacaaattatatatttagttcacatgaaagctttaaatgtacattcactcaaaataatcagttgaagtgctattttttggatttttttttgttttttgttttttttggttggtactacattaatgtgagcaaagcttgtagacaaaaaaaaatcagaaaaaaacttagaatttacagttgtttgtaaaatcttaataaccagttaaaagattgatatataacgtaacatcgatcatgacagttaatcactgaagtaacatcaaatctcaaagatgaaatgaatattagtgctcaaatcttagtacatcaaacgatgtacattagattgaagatttatacgaatttatgtaaaataataatttataacattggaaatttgtttaaaactatacgaaagaataaagataatggaatgaaaaggtgacaacactattcctaaaaaaggaatataaaaagtacattctatcatgaagcgaggcaacttatgtttacacaaagaacaatgcggtcaagttccacttttcttgggtcataattaattttcttcttttctcttcttataaagcaaaaagaaataagaaaaataatactaacaaaaatatatttatataattctaatagaagaaattaagaacagaaataaaagccgaagctaatcaacaaaggaaacatggattctgttgggtagacaagttcccatgaatccttcttcttcctcgtatacctccccttggtcaatcatatctataccccccaaacataggttaattacacttatgccctctttcccgccgtttttgaccgttactaaacccctttgaaaaacctctttaacccactcttcaaacaaaccgttagcaaaaaaaccacaccctttgtaaaacttctctatcagttccgcatcgacggtgaacccgaatctctcttctcgttgcccgaggatctcctcgcacgaatctttgatctttgtcacgaagaatttagttatatcttcgtccgacaaaactgtgaaatcaaaccggttttggatcgagtctagaaaacgttcttcaaacccgcttgagatttcagtggccggtttagcttcctcttcttcgtcttcgtcggcatcaactcttaagttgaggtcaagagcattagattcgaacttcaactgtcttgagaactctttctttatgttgcttatgtcgcaagcgacattgctttcgtcgtcatcttcctcgattcttggattcttcttcttaatcatcgttggcgcagcatcatattccggtttcctcttgttattgaccaaaccagaacctgatttgttacaattcaacaccattggtatgacaaaatgttcattctctacacattcatcatcttctctcgtcaaaaggaagattatttggctcttctttccttgaaaaccatccaaatctcccgcctcaaatcgatctacgaggatgttcatgaactgagcatcggctaaatcaactcgctctatcaaaataacaacctcttccttcttcttcaacgcgttcttgagctcctcgcatgcttcgcttgccttggatgttcttagattgatcttcaacatattttcgtgtgacccgaaaagagaagttgtcaatgtgatagccaatcttcttttggcagtcacatcgttccccgaaaccagcatccatgcatctttcctcttactcctcttgacagattcttccatggcttcaacgattgaaggaagaacatccttttgccatggaatgttctcgtgaagcttttccaataatttactcattttaatcgctttctctggttcttcttcttccgagttctctgaatcagatggaaatggagaatgaccaagtgcaagagtgatcttagtttttacaccttcatcattgttactcttgaacccatccaaactcaattcatcagtcttctttagaccttcttgacgattacttccgaaactaaactcgatagtacacgagttctgtcgtctaaacttagcaacagaactagatgcacgtgagttttgcttcagactcgagtccatcaaagaacccggtaaaacagagctgctctgttctgccctccaagcagtcatactaggtttcttgtggtgaagagcttgacaaaaccggttccatttctttctcagtccactcaattcatcctgaaagttaaacccacaaaaaaaacggtttaagtaactgcacaaacgctaataacaaaacaaagatcattcatttatcaaaaagaagtttgtaccttttggttaatgttgttgttgtctccatgaggttgcagccaaggcggtaagattttgtgctgagctgatataaaagcttttgcttctttctcatagttaaaagcacattctccacagaaattgagtttatcttcttcctcttcttctcttgctccttcttcttcttcttttactctaaatggcttcatctccatcacttgagaagccatctcagaactgtgaccactgaaactaagtaatttagtatccatcacgagtacttaagctagtgattaaattataagaagagaaaaaaaaaaccttgaagcatgaagggttagtgaaagtcctcctgaaggaattgaaacagcttgaagagcccaatgaacatcaagtggaggttgcttcatttgacatctcatgtatgtttggtaagaagctgtccccaatagccaaactttggctcctgtgttgctataatcataaaccaatctccctatctcttccactagatgatccgccgcgctatagttcgaagaagatgcgctgttaccgcctccccaaactgcccaatcaagatctccaagacaaacaatgacacctttgccaccccaagatgtgaaagaatcaatctttctcttcaactctctaacttgtccctctatatcctccttcttcatgaaattcaaaccaacttgtgaaaactgaaacttgatgaaatgtgtttgttttaaatcatctggaacttctcctctctcgattctacccatgagttttgcaaccactccttctgttagagaaacagaatctccaactatgacagtgttcctcttcttgttgttcttcttccctagaagcacttcgatgaccgggtttgcgtcttctctcacgggaaaagcttgatctggagtaaaggtctttcctttagggaaatgaaagaaagggttttgctcaaaagagtgatgattggtcaaatgcgcatgccaaatcttactagggttagggcttaaagtccctcctccttgattgttttcactagaagaaggagagcaaggagaagagaaaacaccaacagaggaagaagagccgtagaaaacaggggaaacaacagaggagtcatcctctatgttactcttcacagaaacactagagagtccagcttctctcatcactctactcacactaggatcatcaagaatcgacacaacaagctgctcgagctcgactttaaccgccaagaacggttggttctgttgactctgctgctgctccacacaccctctcctttgatgcgcctgtgctctcttcagtgccgctacgagagcgttggagagtgaaggctgggtctgaaacagaggattcgggttggtcggaagcctgttgagagaaacattgaaacagagctcgagagctcgacaatggagagaagggtgagccatttggcgaccgagggcagtgaacggattggatttgagacatgcccttcggaaaagattggatcttgacgaagttaaaagcgtcgaagcaacgtgaagaggagtgacttgagaatggcctctccttcttgctaaggttagagattgcttcaaaactgaagcagcctctggtgttagtgtctggtgcacggtataagcccctgtacgcatcacaaaaccacccaccttaaatccctaaacccctcgcaagaatctatcgatctctttttgctatttcctctctacccacaaacaaaaggtttaagtaagactttgaagttcttgaagcttaaaggaagaaaaagtaatggtggaagtaaacttagtgtttataaagatatgtttagtctgagagaagtatcgaagagatgaggacagagcaagttatgaatttatattgttgggttggtttcatactttcgatgttgttttttcttttattaattaaacatcaatttctttatggtttttgttttttaataaattatattctccttttgctttcgtcttttgaatagtaaggcagctttctgaagcttttttgaatttcccacttccttcaagcttcgtttccctccacaggttcaagttaaaaatgtctcgaactatattatatttcatctttatacatatacatatgaaattttgaggtccggcttaataatagctgaggcccagtgaattcttttctaatgtttggttatgcttttttatttatacaaataccatagacactacactaaaatatgatagaatttagggcaaagttttttgcctccgttaattgaaaataaatttatttttggctttaccataaaacagtaagatacttagcattacatggaaaggtaaacttcaacaatatccacacatctatatttgctttcttgaggaagttggtgactcatatctcttaaattttttccatcagttattagtttgatcatgtgtagtgatcataggattataatgtatatgaaggcattaaaccagtgtgtaaataataaccattagcatctttgcgtctgcttcaaactcagctcttgtcaatctcactctacacatagattggaatgagggcatgtttaaatacgaaggtcttgtgatgcaacagataaacttgcggttaaccaattgaatacaaatgagggcatgtttaattgatctaggacatgactggtcctatacatctgtagtcatatatatgtgttgtagatcaatcaaacatgtccatatcattaacttgatatatttgtgttagagatgttttagtttaaaatacaaaaaaataaaataaaataaaaaatatggaccaaagattcaattgccagatcttcctcattatgagaaagcactgtatttccgctcctaaaatacaactttcaaatctaccactaatagatatatgtatgagtagagatatttaggtgtactaaaaacatgcgggccgatttacaccatctatatatatatttgataattgtatgtgttcaatcaatctatgtgaccacatgaaatattaggaacggaaatagtgctttctcataatgaggagattcggcagttgaatccgtctttattctttttaatattttaattaaagtttagtaatataaggagtcatcacaaagttaaatttgagaaagagaactatcaaaattttccactaatattatgctcaaccaaattaaatgagctatccaacgacattatctcttaattatacgaaattttcttttatgtagggaatagtatcatataaaggaaagagtcatatttaatctttttgtttagtctctctcaaatctcgatcttcctagaactacagaactcaaagagcgtaaccacaaaggaaagcaaaagttactaataaagaaacgtgaaattatatttacaatatatataataacagaaattatataaaaattgaggtggtgtcactgtctttgagactgatttttgaagagagacagaatttcattcttcaagtcttctaaaaaagcaacaacctgtctcccgtctttcaattttcaaagcactattatctctctcgccctagacacgtaagatacatatgtggtatatatatgagttgagcaaaaattatcatcaattacaaattggaggaaactgtacatttaacaaaatatttagaacgcccgtcctcttttcaaaaaaataaaaataataattaacgaagttattgcattttagtaacaagagttttaatatattcttatctttttttttcttttggtgtgattatatttagatcttataaaataatacataattgacggaaaagaatacaaaaatacaaacaaatattcatccataatagaatcttacaacattcagtttggttttatatagttgaaacgtttgagtatggccactttgagaattttcgcttaagattttctcggtcaaagactcaaagttatagctcgtgaatcaagaagtgtacttttatcggaaatatgggacttgtacttttacaattttattcacgacgtcggaggttgattgagttggacattgcgattctgtgaatccgtgattgaaaacctataaaattgcaaaatcattgtgtcgaattactgataataccctaaaattggaaccctaagtaatgttattctcggttccatacattgagttcacagatttaaaaccctaatgattcatctaattttggatttggaagagacttttttaacaaatatatatgctattttatcgtaaatattatttaaggcatacaataatccaatatctaatgctaatagaaaagattggtggtcctcactggcgcgcgattagtgtcaggatgaaaaaaaacattgcatgttatgtagaattttaagctttattgtgtgacgcagttaagtttccacagacttttgatcattcatggtactcgaattattgccaactttttttatatcagtaatcaattcattttaacacaacatgtctacgtatctcataatcattatgtctgctccatctcccatgcaaaaggctgtacctcacgtaccaaattatctaatcatgttttaaagtattttgaattttcaatacacaatacaatacggtaatacctgtgtacatgagattatataaacacatgagtggttctcgacatatagttgcatattcgttgtagttcaaatacaattggagggttcgacatggtgcaagttttttttttttttttttttgccgtcgtctagtgtgctgcagataattggttcatttgcatatagttagttttatttgccgaacgatcaacagatggtagatcatcatttttattggaaactactgttcaataactgattttgtgtgtatatatgtagataatgtatcaatgtatgtcagtacgtaataaccgatttaaaccatatataacataaccataaatctcaagttattgcaaggaatgatattagagagacaagtcggagacaaaagaaaaggatcaaaagggaaaaaaaaacgaaagcaatcaaaagaataaagaaggaaggtgtgaagagcttttgcccctgaaatttaagagaatgtgattaaagttgcagctcaagaaaaaaaaaacaaatcaaagcaaaaaagaaaagaaaagcttagaagaaatttttaaaataaaagacatacataaatttctgtaataagctattaagtactttcactttcttgttttgcttcattttgtatgactatattctgcatgcataaaaacggtgacgtataaaccgatcattgctgccacattctttctccgatctcttagtttctctgatcccaacgagaatatatctctttattgtttttttttcctcctttatataaatcttctttttatgtaaatttaaagattttgtttttcaaaagaaagtaaatcttccaatggtataaagggtacaacttagggttacttttatcagatcgattatcttttttttcttcttaaaccataacctccaggttagattaaagaaatcgtagttaaagtcgaataaaaaagtaaaattaaaattagtgccatcattatatcttcataactttagggctactgtatctgataaagaaaattagctagcttgattggatatattgtaaatatatacatgaatttgattagtctttcagaacaagtttttatttactttatagtaattcaccaaagtaaaatgctacattttggaagaatgatgattattattttaaatagttataaaatagacaacaacaaagaaaatagttataaaataaaatgtaaacgacttaactcaatctctattgattaatttcttcaatattttgtaaacgtctatacatacgaactgtacgtcgtattcattgatttggtcgattaaaaacctattcgaccggttagctacacatcgtggtgtaaatggtccggttatattatccaactttactaatatcaagggcatactcaaagtctacacagaaacaggcacgtcagcaaatttaaatcaacgcattaattatgattattaattccgctttgttacctaatgatctaataaagttattatattttattttatttgttgtcgacagttatacttctcttatctctattcgttatgttatatgaattcacaggtaaaagattagagctaataaataacttagaatcataggagaatatttcattttattacatgttatatacttatcatgtttttaagaaaatgaaaaagttaggttaaagtggctatacgatattacgataagtagtagtagtacaatgttcaactattgcagtcaaaaaagcatttttcaccttttacatcttttatggatagttttcactatttttataacttaaaagatgaaactttggtttcatataaaattcttttgatcatctagcgtcgtatccaaaactaaagatcatatacgtatctttagttttgtttatattgggaatattaactttattatctatttattagtgtcacctttgctgtgtaatgtgtatctccgtatatctatgtctcatacttagtgataaatgattttttgcagaaggataagcttacagtgaaaacaataatccaatttctatgaggttaacaaatatgtatatatattttaaaacctctaagaggttaacatatttttaaacgtaaatattagttgctagtcgaatttctttttaacaaagattggcacaaaaattaatgcccaaaatatgattttatttagttgttaccaaactgcctatagtttgataaaaaaattatatataaaaaggaaaattaaaaagggaaacgaaaaacggaacaaatcattggagaggatcggtcaaagaggaataattaagctctttctttttaacaaattttattgtcattcacttttatatttgtcttttgttgggtactgttgaacgaatgtttctttacttccatcacaagacaaataaataactcaatacgtcgcaagtgattctttatattcctaactgtcgactagaaagaaaataaatatcatagttctttgacaaaaaaaaaagaaaatatcatagttactttactccaaaattatagcctatgactagacttgattggccatagaaaatacttacatattatgttatgatggaatttcttcagtagctattcaattcttgttaggatacgacgctatattatgatggagtttcttcattatttacatgttatattatgatagatagaacaagaaacaaaaataaaaagcttctatgtaattaattatggaaactttctttggtaatttttgtttggacgttgtaaattactttgctgttttttattttatttttttttgtatatgttgcgttttcgtttattgttgatttatatattcatctaaacgtgcttccagttttaaataaatttattttgtatttgtaaacttaaaaggccacatggaaaattttcaaaactttacataaatgactgaaattacaatttacaccatttttcttcacacacttaagaagagtcaagactaaattttggaacattcaaacgggctaaaccattaagcatctttgtctgggccgaactcaaaatatatctctgttcaatccgtgccttcagcccaacatgtgttttttcagcccaataagtttcttgcatgttttgaaataaataatgaattttagtcgaattactttctctcatatcggcatattttgttcattttgtttgatgaatgggtttaagtcgtcgaagttggttaaccgatatcgtaacgtaagattgaaccggagtttcaatactcgttacattttttcgtattctagctaacgtgaacggatgttgtttatacagctttctactacaaaagtagatttcaaaattgaactgcgattttcttcttactcttctagaaacacttcctcatatttaataagaaacgaaagaattagactccgacaatattgggaatgtttagttgtcatttggacccaatataatcaattccatacatttgcaattgcaaggtgggtgagtcatcaaaatttatgaatcttccaaagattatagatagaacagcttttaattagcctaataaacaaaaggaaatacgattatgcatacaaaataaattaaatattaagacttttaatgaattcttaaccaaaaccatatcaagtcatatcatacactatcctccatacacgtggtagcatacataagtacgttaaataattttatttagcaaataattttattataatcatctttgatcaccaagatcatgttgggccatccaagccacgactttagtaatgtgaaaacaatatcataaggaacgaaacactgttcatttcatacaattaaaatacaactttttcctacacattttctcaagagtttagtaagtgagagacgaatgatttgagaaaacagtttttacttttttcgatttgtttctcaaactcagtattttcggatttctaatccagattaaaagttctgaataaaatcacggggtatggagcaaagccgatataagtaaaaacctttccatattgatagacactagatttttttttagttcataagatagatactagatttagtttgagtataatggattaatgtggaactagttgtattgtttagtatgtgtatgttgtatgatttagtgaccgtcttcagttttcttgatgtctttccacgttttacaaattcttgaaagaactgagaactcaaatgtatgatacataaccattgaaaaaaatatttccaccatcataaatagagttttacgaatcgtttcacaacttttaattcagttgacaccattaaataatcaatatttctttagttacaattcagtagaataaaattgcatatgctatattatctaattctatgaatattttctgtctatgatatttgatttttatatactttagattttggatcacccccacattatttcgcttttcagtcacattttgtgtttaatattgctagataagtccgtggttatagcttactttgttaaaatcatatatctcaacttatttcataacagtatctaaagaagatggaattttataaatatatagacactcaaaaatcagaagaaaatatatatccacaaataatagaagaaaacatagatttactgcattcaaatcaagggacatgaaagaatatcctggacccaagtgggttatattttcaataaaatttagcaaaaaaagttgacaatcaactaatcatcaccattattggccataatcattacgtacgcatacacatagccacgatgtctacctatgtttaaatctttgaattctgaaactacgtatcttttatttttgtttaaaaaaaacctagtacgtatcttctttccttacttagacatcatcttctaactttaaggatcgaaattagaagaaaaacaaatgattaatatctacaagaacagaattttgcatttatactcagatactcttctagtacctcacaaaaataaaatgaaattggaattgaacacgccctaaattcaagtactatacggtctatacccatttgagtatatgaataatgcatattgtgagtgaaagagatagatacgatacactcttttctttgtttttcaattggacaaaaggaaacagattttgatctctgaattgaacggtcaagatcgtatataattatttcaggagattaagatcccacgtgcttaaaaactctctgtcagactctttatgtataaaatcctcggcccactcttgttttgatagtacactcaatagaaagacacaaagaaagaaagaaaggacaaacagaaataacaaaaccttccatttcaagaaagcatcatctttgtgtgtccgaaaaatggaagatctcgaccatgagtacaagaattactgggaaaccacaatgttcttccagaatcaagaactcgaatttgacaggtgcttactagaatcttggtccattttttttttttttgtttctttagtttttttttccgataaagattaatcttgctttagttggtaattaatgaaaattgttataaattataaaatttaagttggccgatggaggaagcgttttcgggttccggcgagtcgagttcgccagacggagcggcaacgtcgccggcttcttcgaagaacgttgtctccgagagaaacagacggcaaaagcttaatcagagactttttgctctccggtcagttgttcccaatataagcaaggtatgattaattattccattacttctcttatttgtttaatcaactgtctcttttaaatttaatttgttatccaaataatttagtaataaagtttcgtcaccagcaatttttgttttggtcaacagaaattaaataagcgaataaactttctcttctttcttttgtaaagaaataaaactatacaaatacaatctggttaaaccaaatccaaccaacattaaacaaataagcaaaccaaatttttgatactctaaatccatatcaagccatactaaaatgtattttggtcccctaattaccctgatagcatataattgtatacgtgtgatgatttgttgattaagactggattttattgaagtattaatatttatctatttttagttggacaaggcatctgtcatcaaagattctatcgactatatgcaagaacttattgatcaagagaagactctagaagcagagatcagagagctagaatcacggtcaacattgctagaaaatccggtaagagattacgattgcaattttgcggaaactcatctgcaagatttctcagacaataatgacatgagatcaaaaaagtttaagcagatggattacagtactagagtacaacactaccccattgaagttctcgaagtacgtactatgcattatttggcagtacattctaaattacctttcttttgaggtaaagttaattattccaaattgtttttatataaacatgaaaaaacagatgaaagtgacatggatgggagagaagacggtagtggtatgcataacatgtagcaagaaaagagagacaatggtgcagctttgtaaagtgttggagtctttgaatctcaacattctcactactaacttctcttccttcacctctcgtctctccaccaccctcttcctccaggtcactctctccctctctccctctctcatatctttatttggcaatgtgattactagtacaaactacaaaattctaaatgcatctagagaatactgtacgtgtcttgttttggtttgacgctcattttgcactcatggagcgaaattataaaatgttaatggaaagagatgataatatagtttagaagattcttgctaataaagaatgttagatcaattgtaatcagctataaaattagttttatgcacttgtcggactataaaacacaccaaccaaatatatttgtccatttttaatttgtcgcaactattcagacttttatataccaaattcaaatcttactattttcttttctttttggttattttgggagaaaaatggtcgtctgacggcacgtagacaaatcctttagtggacaagaattaataatatgaataaaaagcatatgactaagtgctttagtaaagtggattgttcttttgttttggtaaagaaaatatgttatctttacgtaatagtacaaaaatgtaattcaaacttacgaattgtttggaaaatcactatcaaattcaaaaggataacctttagacggacccatttaattactacttttctcccacctgtctccattaagtggaccttaattcacattacaccttaagtatatatagtcagtaatatcttaatcaatcaattaaagctccaattattgaggttgcctcgagcccatcacatttttttcgaatttcgccttgactttttctgatagggttagattctctcaaaagttaaatgtcatattccataaaaaattaggattaacttaatcaaaaaattagtgtgtgaaatctcaagtgcctcgtgtcccagaaagtgccgtccaagcatagtagcactagaaaaacgtggctaatttataacctcacgcggttcaacgtttgtctctttcacacttttagcacgtgacttttctagcactacaccttatatcaattcttaactcaaattaacaataggctacaaatcaactgtagccaattagcaagttatttgtgttaactagttgtatatggttcataaggtcttcattatgctaatcattttggtaaaaattagttactccaaatgatatccatagcagttcatggtagaaattaaggtttggtcctttttaatataagcagatttgttaagagttattattttgtgtttttactctaaaaaatacaaattcatttcattatctctatctatttgatttgtttatcatcatcatatactaggactttggtgtaaacaatctaattacaaaaatgctagtttcgtgaactaacgttctattttttttgaaaaaggtaattatattataagctgtaggttggaaatttttgatgacaacaaatacgagtatttcttgcctcacaaatgaatataatattatgttggttttctttgacaaaaaagaattatgcacctttataacattttcttgataaaagataatataatcagacgctaaaattacagtgaggtatagaccagtggagtcattgagagttggtgaaatcatactccaatcatttatcaaataaaaagtcgatcatttcatttcaaacctgtccttatccgtccttttaaagattatacaaaaacattaaacaatgatttatccaccaatctcattttccacgggaaataattatagtagtaatgcgtgcaggtgtatatacacaaatttatcagttctaattttctttttacgtgctgccaaaaaaaaagaagttttttttgtctgattcgtgtaaaacctaaacacccctaattttaataatctatactgacgttggacttcctagaatcctaatttacttcaaaattctgtaaagatatcgtatgattgaaataatataggactgttttagtttatattgtgatagatgtattaattatagtaaatcgttgaatttgcaggcggatgaagaagaaagcagtgcagtagaggccaagatacagatggccatcgcagcttataatgatccaaattgtcttatcaacttctaatttacttctggttttttacttaaatccgttttatgcaatatatgtgaagagctactattgtgagggtttatttgtttgagctacaaaacatccgatgttttctaataaaataaaacaaaaatatgcatgttccttcttataatcttaaaaattatacttctaaaaaaatcatttgaattaattgcaatcataaccgagtataagaagaaaaaaacataaagaaatatggttaaactaaaaaagcaaatatgactttataaaagattttgtggatactttgtctttgaattgatgaacatgaatcaaatgcatattgtaagttgcaaaatagagagacttgccatttgtttcaatttgatctgtaaagttaggcaacaaatgtttagtaaactcataaaagtgacagtaggctttgttaaggagttatgttcagataattgcagatttgtaaacaatttattcttaccgctatatacactcggtctaaaagctttctctataaccatcatctttctatgattattacttggttgaaactaaaaatatagttgccaatcttactctatctgtaagaacctaaatctttcagctttattattttttaaactaaaattaaaagccaaagttatttggaaaaagggaattaaaaaaaaaaagagaataaaaaacgaaatgtacataattcaaaaaagagagctaaaaagttccattaaaaaaaaaatcccagttttatttttttctgggggattttatctgaagtttaaatgacacatacaaactgaataatacacaaaactacattaggtactctcttagactacgttccaaaagaatctaacaataccaaaacttctgcaaaggacttttttcttttcttgatatatatatatatattgttaccttttctccttgatctctgctattggaacatacactactgagtcttcttcaagtaaaggagaagaagaattgcctaacttttttcggccttttggtgttttaaatctatcaagcctctgcgtcacgtccagtaacttgttttctgttctacaaagcatctccattactgcttccaattcttcctcttccgtcatctttctccccgtctccttctcttctaagctcatttcgttgcttagctcttcatgtgactgaacacaataagaacaaataaactttaaaaatctacaattgtctaaaaccacttgtcaaaccaaattcatggaagcgatacttgatcatggtttctttaatatagatatgttcaataaactcattttggcgaaccagctaatttcattttacctcttccgtcatcttgctccctgtctccttctcctctaccgctgtacttaagctcatttcgctgtttagctcatcatgtggctgaacataataagaaaaataacttttaaaatctgaaattgtttagaatcactggtcaaggcaagttcatggaagcagtacttaaccatggttgttaaatatcagatatatatgttctatcaacttattttggcaaatcggctaattcatatcttacctcttccatcatcttgctctctgtctccttctcctctacagccgtctttaagctcatttctctgcttagctcttcatgtggctgaacacaataagaaaaaaattatttaaaaaatttaaaactgtttaaaaccactggtcaagagctcaaggcaagttcatggaagcagtacttaatcatggtttttagtaatagatatgttcaatgaactcatttggcgaaacggctcatttgtatcttacctcttctatcatcttgctctctgtctccttctcctcagcagccgtctttaggctcatttcactgcttagctcttcatgtggctgaacacaaaaagaaaagtaactttgaaaatctaaaattgtttaaaacaactggtcagccaagttcatggaagcagtacttaatcatggttttttattaatggatatgttctagaaactcattttggcgaaacagctaatttatattttacctctttcatcatcttgctttctgtctcattctcctctacagccgtctttaagctaatttcgctgctttgcttttcatgtggctgaacacaataagaacaaatcacttttaaaaatctaaaattgtccaaaaccactggtcaaggcgagttcatggaagcagtacttaatcatttctatcttaccactagaacgaaagaagaatcgttttgttccagatactgttgactttcatctgtgggtgaaggaaaagagacattttcctgttgaaattcctcctggttgttattacatggggagagtatgttttgatttgtagcgtcaaatccgggtggaacagtgtcatccaaagtatcttgaacttcatttgtttcagtgttgttctccatgactgcttctggtccagaatctcctccagagactgtcttagaatccccaggttgtttcacgctctcagtctatcatatataaacaatggcagccaaatgatcaatctccttgtaagaagtttagtctctgtaggcatccagacaatgttcatatgtgtgaatgaagcaagtaatagcgatttaccttcctattccgcagtgccatataccgagtatttttaaaccatttattgacctgtaaaaaaacgatattgaagcacacgtagaaccaaaaaaaaaaactaagaaacccaaatgttcattagctgtatgaatgagtttcataagcctcgattgatctaagaaacattcgcaagataacttttttttggctgcactgttaccttctctggatcaagactcagctcttttgcaagacgatccctcacagcttttgagggaagctcagtctctgcaaatacttgacgtagcttctggtacattcatgcaaaaaaattaaaacttagtaataggtgttttctcttcttttttttctttcccttatggtaaactacacatatataagacactaaaaccgggacgaagcaattgcaaacctcaactgcatttcttgggagtctgaacatccgccttcgacctcctttattttccacagagacagaatctctctcactctgttctagcgtttctacaacatcttgatctttcttactgctttcacacatagttacaagtgtgcttcctgcatcagattccctttttctcttccttctgtcattcggaccccagtcttcatcttcactaccttgctcttgcaaaactgcatcctttccaaacatttcctgagacaaaaatatagccgaaaatttcaccaccaaaacaacatcattaacgaattgtagcagatcaacatttcagggattttgaaatccatggatgtggtacgtacatagtacaactgtgtatagtcaacagtccttcgctgtcttggcccacatacagtttcttcattacttgtttcgcactgctccaccatattgctgagtctatggccttcccatgatcccgttgaaagggcaacaccatcagatgataagctcaagctagttgaaatgctttcttcatcgttatcaccaccaccatcaccactaacgttgctgctgtttcctccaccgttttccctcatttcagggtcataatcatcatccttggagtcatccgaaggccaatctgcttcattgttaactgtagcttcagatccaataggaagactagcttcttcattgaagatatccttatccatacaaaacaaaagcaagaaaagtttaactagaagagtaaagcagagttcagatagggaagtgtctctatcttgcgttcaaacaaaatgaaacacaatggtacttgccaagggtttacctgccagttgctgtccacagggaaatgagttccaatttgtgcattcattgtgtcgataatttcaattttgcaatcacaaaatttgcaaaaccagccctgatctccgggaggtactgttcagatttttaaaagcaatatgattgaatgaaaaaactcaggtggagaagccacactgtataaactctttaagactatataagtatatgcaacagatggctagagcttactgctttctgtttccaaaggagggtcaaggcatttctggtgaaatgctcgattacacgttccatcacaaagtattatatcattgtctggaaaagcttctcgagaattgcattctgcacaaaatatctgcagaaggtaaaaaccatcaggcaattctccagtgtagtttccagtatgaactataaagacatgaataaataaaaagagttgcttacatgatcatgatgaatagatccatctgaagctatcactttctcttccatgcttcccacagaactaagcagatccagttggcgaatggcgtcgcgtagtccaagcttgcagtttaagatctctttccgggctctctcaagctccttgtctggtcttatcttttcccggctgaagaagacatggaaatacaagagtcaaaccacataattgtttgcaactaaatatggccaagattgtttcttcgcgttcgcggttgcatttgtatttatatttccactttgaactttacaaatgataattagaatactataagcaagtaaacgtaaatgcaaagttcgtttttttacatttgaaacaatcctggcctatggagaacagaggaaactacaaattcaatttggaaacagaaaaaaggttgaatacgcgtaaaacaaatctgtggaccgaagcattgaccgctataaacttaagaaaactcgttcgtaacgcacaatcatcattcttttggtaatatatccgaggaaatggtaaaattgtaacattttttccatataagaaacagtgagtctatagggaagaaattcaaattttgtacctctgacctttccaaccttcagttgcgtatgcatcgataagattctgctgcatcttcatcttaatgagcaaataccttgtcctcctttgcaaccttaaagaatcatcaacctcaaccttattatccttttgctgtctcttacttttcctctttcttgttttcttaaccttctcctcctccatttcctcacaacggacccatccccgagagtacttcttggttcttgatttcgaacagagttcttcttccgcttttcgcttattctgcttagaatttctcttatttgatacttctttacctttcttcacaaatgatgagagtaaagtagacccaattctctcaactgaaacacaagccttatcagtttcttgactgattctcccctttgtttcactctcctccatatcgaattccccgatcaccgagacttatagtcctcttagcaaatcatttcatataagatcttaccctgaaatattcaagaaccctcccctaaatcagtttcctcacatttacacaaccaaaccaacaaactggaactaatgattcttaattccccattaaatgatatcccacggagaaaaggactgagtctagtcttgcacaatttaagaaacaacacacacattaaaggcactgccaaattcagacatgttttgacttttaattcaaaagattacagatttgtgattgaagacgacactatcagacaaaacaaggaaacagatcgaacattacactaaacaaacacaacactaatctcttcacatctcaatcatgctccgtgacccaaaacataaacaaattaatggtaaggtagattatgtaactaatctgagcacaagaatcgtaattttgattcaacggaagaagccaacaacaggaaattgagaaagcttaagtttttaacagaataaagcaaaacctggaagagagtaaggattgaggaattgagaaagatgaaggcaaagtgaagatctttccgatgagggttaatggagggtactgaaatattggtacggcgggtttagagttaccggcggcgacttgaaagagtgctttcaacggtcgggtttacgtcactctccgttcatcgttttaggtactttactttggcaatggtaatgctccagcaactcttacttattttcattttaagtccctgtatttagacatatttttccatattgtatctaagttttccttttacattcttagccaaaaataagtttccatttcgatcgcgaattgaaattcatgaatctaatctttatgaatagagacgagtctttttgaaatataattagacttcttgtatatattgtttactcagcccagttaatatagttattgggccgaataaccaacttaagcccattattaaaaataaaatttgaagaaaagtgatttaagttgggtccagagagatgaatgaaatttaagaggtgggtcgagtatttgtggtcggcaaaaagctatagtgattagtgagtaggtttcttggatattttaacttgttaaagaatcgatttaggtcggtttggtccatatgtaaatgagtctgtcgtcggccgggattgccgaactcgtcaagtaaaaatggtcggtaaatatattctataacctaaagttgaaaattgtttttgttcttacattttttttttttgtatgcgacttgcctatctaattttgtttgtcactattcataaaataggaatgtttaatagctttcacatgattaaggaagagatcaagatatggcaatgaatcatgcaccacatgggtgaagtgagataagaacaaaagctagcccataaatatttttcacatgttattcacattaaatttgaaataatcaccgactataaattctgtggtgtcgaacttgttgattgcaagaaaacaaaattataatttatgtctatatatataatgggatgcattactcggaaatgccatcttatatattgacatgtggggttaagttcattattctatttttgatatggccatatcaaaaataaaagggtccaaatatattgacatgggagggtcctaagaatatatgaaagtcatgtagctttgtaaaattattgttatctattttatatcttaaaatcaaaatgatgggatatagagacaaaccgccaaaagattgtcttctaatgaaataatttttcaaagctataatgatttcgattattatgttttaagactatgtgttacttacagatgttgtgacatgttcgatgggctagtttgatctaattctaccacgattagttttagttttacatgaatcggttttaaagaattttgattttgtttgccttgtcgaaaacatagcctcgttgttcactcacagatgagtttattgtgaatgacggatcaaagctattgtgattatacaaaattgtaagctttttcttatggtcatttttatatgttatatatggtgcatatacttatatacataacatagacgtattagttaattaatatgtgattggtaatggattaagtttgtaattgcttccaattagctacaaccaaaacttagattataaacaaacatgagtattgagtacacgaggagataagggatttgtggtttcataagttgcttactcctaaatgtcggatattgttatataataacttagtgtattaattccagctgtcatatataaatttgtaataaaataagtcatatgattgcgattgtaagttgtaactatagtttttcttttcttttctcgacaggtatagagttataaatattaaaatgtattttgaaatcatttaccttatcttaaacttaaaactttggactaattccttttgaaaaattaaaaaaaacttgaaaataaaaggttttaggggttttggatttgatctataatctagagtaacattttattggaggtgaaagactgaaagtgatttgtattatactgttctttttgtctatcgggaaaatggaggtgatgtagagggatccacgtgtaagatttcatgtggcgtagaagattaggatcgacgttgaaaaaaataaaatatcatacttatacgataatatagaataccaaactagtataattttcaaatgggaaaatcaatttgaggaccgactcttaccaacaactattttggctttttttagatgcatctaatttaccaatcattcacgcattgcctcaaagataatatgacttttcgtgtccacgaaaatatataattcctctaaaagaaaattatagtaagtattaatttggtcgtggtcgtcgtcttttatcgtttttacaagtaaacgtagtatattgataaagactactatttaaaggtccacacatagattcagtaattgggtcgagttttgtagactcgtgtaggatcgagtttaatagttctaaaaccagattaaggtaaactgcgattcatatggaactaatccagagaatgataagccatgttagattcatgaaacatgaattgttttgttcgtagcagttacatgcaaattgatccgcataagtcataaccacctacgacaaaaaaaaaaaaaaaaaagtcataaccacctaaaactcttaaaactcattgtctaatattaaaatagttcttatcgaataaatttttcattttagaactaaacaattaatgtaaactagactcgtcgttctgtcattactctcatcatcagtttctttttttttttgattcatattctcaatcattattgatagcaaaaaaaaaaatatataacaagaagtacgtacaatccattgttgtataattaggtcacataaaatttacaaaaagtttgtttgtctttctgtacactacacataatctcggaacgcataattctatctatattgacacgtcatgaagacgtgtcgtaaagacttacttggatatgacttctttgtaagttgcaatgaaactcgtggttaatgccgccaaatctgaaattcttggaaaattcttcgaatatacctttttaatactcatacatatatacattttctcacataacttaatccatatttgaggtttccaccgaatcgaaatgttacaaaattaacgtatccatgcaaatcaatcttttttttccctctccgtcgtcaatggaaatcaatccatcaaagaaactttaaagcatgcgacttttctctgcatgtatagattagtaaaaaaaaaattactttatgggaacgtaaaattgtcatggtcttttgaccaaaattgttttagattctatagttgcctagttggtataatatcttgagccacaaattagaaaatttactaggtagattttaagaataaaatcacaactgcttaggtaacgtaaaatcacaactgatttgtttactgatatatcaactatggttcttataaaaaaaaaactatcaactatggtaacaatgctattcttaccttggactaactaaagttattgaccaacataaaaagtgattaacgaactgatcattgagcatagtcaatatcaaatacaaacagaatgaatatgttccaaataaatatttaaagagtcgttaattaacgataattgacaaagcttgttccatggtaaatcaaacggtaataatatatagtcttcaacagtcatttttattgtataatgaaaatagtaattttattattattattaagatgtaaaaaaagaataaaaaaaagagagtatttgagctggtgatgcttcatcatcatcgtcgtcttcacactttgctccgacaggtcaccacttaagttttgcttttctcacgaaacaaacaaacttgctattttcttctctttttccagaccatgagaaagcaaaataattgagctcattctctgcaaaaaaaaccatctttaatctcttccatttggattcggagagagaataaaaacgaatagacaatttgattctctgtttctctctcacctatttttattgtgttccgatctgatcggatttaattatcaggttcattttcgatttaaatttcgattcttttttttgctggtctcaacggagaaattttccggtgacagcttaaagttttgatttttaattcttttttcacgaagaagaatttcaattttgtgaaaccgttagaagaagaagaagaaaaagattataagcttatggttccatcggagatagaatctctaggagacgaatctgatcgtcgtttcgccaatctgagaggtctgcgatggcgcgtgaatctcggtgttcttccgtttcagtcttcttccatcgatgatcttcgtaaagctacagctgaatctcgcagaaggtaagcaaagtttaagcttttaccctttgttgcaatgttgtgttgccaaagtttcctaatttgggaaactttaagagatttgagctatctgggtttagcaagagatctaattggctcctccaatagcataaatgttttggttttacaatgtttctgtctatgtagatatgctgctttaagaagacggctcttgattgatccacatttgtctaaagatgttcgaaattcccctgatctctctatcgacaatcccttatcacaaaaccctggtataagcttttctgattcgagtttcatatacagttttgctgagattattgggtgttgattatatgaaaccatttgcaatgcagatagtacatggggtcggttcttccgtaacgcagagctagagaaaacattggatcaagacttgtctaggttatatccagagcattggagttactttcaagctcctggatgtcaaggcatgttaaggcgtattctactcttgtggtgccttaaacatcccgagtacggttatcgacaaggtatttaaaatagtgaactttaataactagagaatgtagtttttgtaatgtataatctttgacactttttcatgtttctttgcagggatgcatgagcttttggcgccactgctttatgtacttcatgttgatgttgatcgtctctctgaagtgcgtaaaagttatgaagatcatttcatagacagattcgatggtttatcttttgaagaaagagatattacttacaactttgaattcaaaaagtttctggaggatttcacggatgatgagattggtggtattcaggggaattcaaagaaaataaagagtctagatgagctcgatcccgaaatccagtctattgtgaggttaagtgatgcttatggagctgaaggtgaactcgggattgtcttgtccgagaaattcatggagcatgatgcttactgcatgtttgatgctctaatgaatggagttcatggttgtgttgcaatggctggattttttgcttactctccagctagcggatcccacacgggtttacctcccgttcttgaagcttccactgcgttttaccatcttttatcattcgttgattcgtctctccatagtcatttagtagaactcggagttgaacctcagtactttgggcttcgctggttacgagttttgtttggaagagagtttttgcttcaggatttattgatagtgtgggatgagatattctcagcagataacacgacgagaacagatgcggataacaatacaaaccagagctacaagatctttgattctcctcggggagctctaatctcgggaatggcagtttcgatgatattatgtttaagatcatcattgcttgctactgaaaacgcagcttcttgtctccagagactattgaatttcccagagaagattgatgtgaggaagataatagagaaagctaagtcattacaaactttggctttggatgatgatgtacgatcatcagctctatcgataaatgatggctttgatcagagcatcagtccagcagtaccggcgagaactaacagttttccttccggatccacatctcctaaatctccattgataattaccccacaaagttattgggaggatcaatggagagttctacacaaagccgccgaggaagagaaaaagagtccttctccaatacagaagaaaaagccttggttcagggtgaaaagacttttcagagcagagtctgagccaactcatagcgccaagtcaccaaatgggaaaagtgaagtcaagatatcatcagttgcgcgaaacttgcttgaagattttaatcggcagcttgtttctgaacctgtggaagctaatccaatagatgttgtgaacaatgaagatagctcaattcgagaaaccgaggatataaacacggattttgaaactgctgctgaagagagtatagtaatggaggagaattcttctgatcttttctcagatccaaacagtcctctcagagactcaaactacattgagaatgattcggatagcagtaacgagtcaaatctatttcctgatgaaacagttaaagatcgagaaacaagcgtagtagattcgcctctttccatttcttctcaaccgagcatggagtttatagtatctctgtctaaagatcaagaaacaagcgtagtagattctcctcttcccgtttcttctcaaccgagcatcgagtttccagtaactcagtctaatgatgaagacaacgctgcagataaatctgtggccaatatcaaggagcgtagtaaggttttaccaggaaaattccagtggttttggaagtttggacgcaatgtcactgctgaggagacgagatgtaatggagtcgaaagtagtaagagcgatttagtttgctcttctgagtcacattctcttccacaggcttcatcttcgggcagcaaaggagacacagaccagaatgtgatgaatactctgaaaaaccttggcaattcgatgctcgaacacattcaggtacaagtcactctcattctcattctcttcatctatgctgaaaatatcaaatcaaatgttctgatgatttgtgaccatatgttcaggtgatagagtcagttttccagcaagaacgaggtcaggttcaggcaggactaattgagaatttatctaagaacaatttggtcgaaaagggacaagtcacagccatgactgctctgaaggagcttcgaaaaattagtaatcttttgttggaaatgtgatggaccctttgattcttcttgttctgctctctgtatatatatatatatctaattttttgtaaagtattgttctttagagcacagaataaaattaaggaaacgttttccttgatctctgtcgattttgctgcagaaataccaaaactttttggtttagcggtcatgtgtaagatgttatcaataaagatacctaagtcctgagatcctctgctttgaacattagaggcaaaagcataaaaattgcggctcacatacattaagttttggagtctgaagggtaaaattttctgtacttacacattagatcgaaggagactaaaagtagaacacaacactttttttgagttgcagaagatgaaagtatgcagaaaagagtctacttctactctatgttgtgaaaaccagggagtaatgaagttatgaagccgaacactatcatctgaatctctttcactatcccccaccattgattcccttggtttcctgcgtcaacgttttcattttcatttgcatttgctcttgctcggttaccgttatcagcttcattctcttctccctctgctcaaaaaatagaaagattatccttctgcataagttgttgttgtgatggcttcagtaaataccatgggaaagagatattgcaaagtaatataccgagaacagcattttcgtttagtggaactgcagctgcgggatcattatcagctctaacagcaggtctatgtggtcgagcaggtggtactgctgctctatgcataccttgtgagagccatcgcacaaacggtgcaagagctccagtttggtatctgtcaagtttgcaacaccaaatagagatcaaactctatatcaatactttttcagaaaaaagattgatcaatgggaccttataaacaaccaacaatttatcgtgaatcatgcacttgaaaggtcgttgtctatggtgaagaagacataccagcataagattgaaattaaacaagattctcgagacttacaagtaaattatggtagcgaaaatcacaagaacagcaagcctttgtcttgatccatcttggttgaacaaaaagataacagcagcaagcttgagtatgagaaacaaatcaagctgaaacgcgatctgaaatctcctttccacaacatgcctttgatttgcaggtagctgctgctgctgaccctgcccagcttgcgcttgattctctcccccagtctcagcttcattatttggtctagtcctaaacaaaatataaaaccatcaaccccaaaagcatcaacatcagtcgtatactttctacttttacctcatctgaagccaaaccattactaattttgtcataacaatggtttggattcaactcctaagccaatgagcaaaaggtaccaacttgttggcaaaactatgattcgtctaactaaaccagttacgtatagctatgattcttctctagtgttacactgagacaagctaatccatcaaatccatgggagaattcgaaggagttatttacttacgttggaacattgtaagtgagagggataagataatttgagggaagaccagcgacatgtcctccaaattgatgaacaggaaccgcatagatcccagctccacggttcatttgttcctcgtactgtacaggattggatccgggaacaagacccggataaaaaaccgggtacattggagaatcaccattaggataagctcgaaacccagaagaagacgctggatcctgttaattcaaacacccagaaatgaaattcgcaaacccttgaattgatccagcgaaaggggaaaaattgagcaagtcacagacctgaggtttgatcccaacatcttcaggtttcttatcaccagaaggttgatgtaatactgaagaagacaccttctctggttcttccgtcattttcaaaggatcaaactttacgcagaagaagctctctgtctcttgaatccgcgaaattgttcttcttctccttcgttttttcttcttctgaaagtctgataatttttttctttggaggtgaaattttgctctgctccttcgtcagcttatccaattaaagttggacacgtcacctatgcttgtgacattgttatttagttttgtatttctagtaaattgcacaaaacatcctggttctttaccaaaagtgaaattttggacaaaataataaaattatgttgttaaaaacttatccatccaaaattgaggactaaacaaacagaagtatataaccaattatcaaagtatcaaatcgaaattgagattcagttttgttcatatgattggttaaaacttttttgttctctccaaatataaatcagataaaaaaagaagcttgtcttagacaataatcttacatgagtcttgaacataaaaaagaactagtgaactagtcatcatcggataaacaaacctttggtagaaacataggactctctacatgatccaaagagacattaacatagtcatccccaagtccttcaatcacaacttttctggcacttttttccttgagatcgtaacaaataaaaaagaacggatcggtaataaagcacggtgcaaatataagctccccggtactaagtgtatccttgaacctgaaactttgatcaccaactaaatctgtccaacaaggaaccaatagagaagcttttgaccattcttgtttactagcatcatccttcataacccacaagtcaagtgtaccgttacaagagtaactcgttaaagctatctttccattgtagttcaccagattactagaccatatatgtttgacatccttagggaacttaataacattgaattcttcagatctcagattgaagcttatcagagataacagtttatgattgatcctagctacataatacacaaccccatccatacatattcctttcttttcaggatcagctagataatggtgatgcttacattcaatcattctccattcttgtttagctcctagagtgaaaacttgatgctcctctgtccgaataattctaatatcatctatgaaatgaacatatagttgcgtcatgcacaacactttgtatagatcgttaacgggatcatatccaaaaaatgatactctatctatatatgaaccttttcttagttttgagtttaggcaaagttacgaattgaccagtactaggattcccaatcaacactttagtaccatttagacagcagatcaagccccggacgggtggagaaaaccgatactctagatcatgattcaaagtaacagctaccctgtgatgatcacaagacgggccctccaaggagctggagtgcaagaactgcatcttgagacgggagactgagacttgaaaaagaagacgaggcagagtggaagatcgagtcaggtacaactccgtgatatctttgtcgaggatgatcgatgaccagtgtttcgaaacgaagatgagattggctatggatttggccggcaatttcaggagaatctctatcatcagctccagaggaatattcgaaaacagatcgttttcttcactttggtcttgtttcttatccatggggagttttcagttctgctcactttttttttaacgcttgattggttaaaccctaatcgtccttatattttttgcaagtcgaaaccctaatatcaagaatttttaagaaaaaaagttaacaagggttcgcttaattaatcgccgagaaaaacgtttaagccgatgaattattagtccgatacaatacacttaacttactacaagacaaagctgatgaaactgaggttcggaagtggaacgagaggaagttgagtttgagtaatttgttcttgccttgcgagatttgtagagttgtttatatattgagccgctaaaaacacttgggctaaatattgaagctaaattctgtttatgcacgtgaagagtaatactagtgtggagaatcttgcaaaatccctgagttttagcctatctcaaagtccttgcgtaacacgattcctctgctgatgagctttttggttattcccttttatttaataagtcggtattgcggtttctttgtttattttctacacaaatttggaataaaacagatctacaaaatctatcctaccttttttgttttttgacatatatcatcataccttaaaagtttctaccttatatagaacttacataattcgtacgaaaactaatttatgggatattcgatctatgttaatacttttttggttaaataatagctgtatactgtatgtagcaggattggccacctaattttttttttttagttatattttacacatactaaaatctcatttatagtccattcttttttttttttttacctaacattgatattggaaacttataactttgataatggattgcaactaactcgaggtaattatcagttgttaaaaaattcactttatgggttatgacttatatgagattacagtatctttgaatcctccgactccaatttcaactatagttcaccactaatgtaaatgttttaaatgaaaagaaaactggtacgatgctataaaagaaaaggagcggaagaaagtgaaaaccaaaccctagtttcggtgtcaagttcgttgttaattatttgaaagtgtattagtaaaagtagaaagaaacaaagtggagaagcgaatcaaaagtaaataactatatatcgccaccaccgtaacgagagaagttaaatggaaaagccattcgatggataactatagtaggagagacgaataaatctggctcagagatgagaacaccatcaagagtaaaaccagaagctgaattgttggtaacgactatagagtgtccagagaggagtgtagggatgcgagagaaaggcatcatgagacttatgacggagaagtcaagccattgtggaacaatatggtaagaagcaactagtggtgacgtggcgttgattccttccacggatgttttggggaggaagagagttgaagttaggactggaccgtttaattcgtcgttgttgttgaggaacgctccgctccaatcttcgaaagagccacttgagaccattgcgtctatgattttggttgcgatttggttttgctccgtcgtgagaaatggaagtgaagtggaagatgtaatggtgatgatagcgatgatgaggaggaagaggaggaggtgcttggtggttgccatggaagagaatatgaggtatgaaaattgttgtagtgttggagggttcttcttttttgtttatataaaagaataatctgttaggtgaatcatgtaaattagttttgtatttggttgtagttggagaatgcaaagagctataagtattttcaagtgcatttaacatgattcatggctgattttgaatgatactgatagtaacggtaatgatgggatgataatacactgatagttttatgaagatacaaatatccatctttacctcgcccgaggaaccatttcagtatcgaggttcatcgtaaccattctcacagggtccttatggtcacttcgattgttcactctcccaaagatactctgtttcagctccataacgacttggctcattgtcggtctttgttctgaactctcagacgcacaagccaatgctagttcagtgatcttccaagccgagccaacctcaaatctatctcccagacgttgatccacaataccttttatgtctccattcgccaacattgaaccaacctgatcacttagatgcacactctctgttcttgaatgccaaattgccggttttcctgttattacttcaagaagaaccaccccgaagctgtaaacatcactcttctcgttcatttgccgcgttgcgtaatacctgaatttaggcaataaaaggatttgaacacatctggttaattatacatctagccggaatcacgaatttagattctaagagaaagattatcattactcagggtctaagtaaccgatggttccagcgacaacggtggagacttgactactaccttcgactgggaagcttctagataaaccaaagtcagctatcttggcttgaagattctcgttcagtaagatatttgccggcttcacatctctgtgaactatgggaggcttgcaaccgtaatggagatactcgaggccttaatcatttgaaaattctcattcagattgcgtaaatttttaaaaagaactaattttgtgttttttgattttacaaaccttgtgctgcatccaatgatatctgtaatctctcttcccagctcaagattaaggaactttttcctttacaataaggaaaaaaaaaaaaaaaaactgaattagtttagttgcttctgttaatacaaaagggctgtgagtttattatctaaagactaacctgacaaatagtctcctaagtttccattagccatgtactcgtagataagtgccatgtggttatcttcattgcagtatccgataagagatgtcaaatttgtgtgatggactctcatcagaagctcaacctgagagaatatagattagtttggactttggatgcaaaacattattaggaattacagagaaatgatgtcttaacaagtaatttagagaatgacctctgctcgaaactctttgtaaccttgagttgactcttcggaaagtatcttcacagctacttgatctccattcaagaaaccatggtatactttaccaaaacctcctttaccaagaactctctcgaagttgtttgtgatattcacaacttctgagtatataaagtatcttttggctgtgtccaatggtccggtgttgacacctaatggtttgtttgagattgtacctcttcgtgatcgttttttaaaatgccagatcaaagctaatgcggtcaaaacaatgagcaatcctgcgagtgatgctactactgggacgatgtaaccaattttcttcttcgttgttgtttgacatgagggagactgacaaaggtccgggtttccaccaaatctaaagtttacaaaatagaaacttcagtctgtatctttcgcaatagaaacggttcaaactacctcacatagcaacaagcaaggccatcctttctagattgcaatacgaaactaaattgatgaaaatgcacacattatgtttcagagctcattgagatgcatacctaagcgaaagagaaccatcttttgatttctccaacagtttagctggaatcgaaccagttaacttgtttccttccaggtttctacaagtataagcacagaaccttgtataaatttcacatgtaataaactgctactggtttataaatctcaccactatagtatgcacgactcacaattcagtcaagtttggtaaactggcgaggaaatcgggtactttccctgttaagctgttgtttgataagtctctgtaatgataatttccttgtgtcagtcaaaagtttaaataccattgagtgcacttatgttgattacaaagagattagaaacactgacaatttatttattgatgttaggttggcgaaagctggatcaatctggccagtcagtccactggaggataagttcctgcgaatcacaacgttgtttgagatacatgtaacagcaagagcagaacagagaaaagcagagcagttgtgaactgaaaaaattcttacagagcaatggattttggagaagtattattatcactatggagacattcaagaccttcccaagaattgtccactggaacacatgggtctccttgccagttcttctttactctatacttgaacttaatcttcgtcatggcatcaactaagacaagataaaacaaaatcaaataaagtacagaagaggaaatcttttgagtcagaaagccttaccatcctgttgatctgttggtaactgaaggaactcgttgatttgatagatctctatagcgttgatgatcggtggaagggtcgatacaccagttctctgaaggacaatttcattcatttttctgccaactggatctacagtggagcgtgtgtctgtaaacaaataaaaaggacggaaattctcggcaagtataacgtcatttatgtatatatcgaattctcgtgtctcgtttctttgtagctctcgaacttcagcgaagtgcatgtatatataaaacttcgacctcggatcatctggtgcccagttaaacttcaagggattgctttcgtttccaggtgctatcgcagatctcatgactatactagcaggtctgaaaccgttgtggttagtttcatcgatggtgagggatgtattcaaagttttctggtacggagacttataaggcatccatatgcgatcatagaaatcatctttgtacctacaaaacgattacatttagcagggagaatataacaacaaaagaataagacatgttttcacctgatttgaagattggtcgctgtgccgaaatcccatcttcgaccaagcataagcgcttcataaggagtgtcatatgtatcgttcttcaaaaatcttatttccaagacagagagaaaaggagttcctctgtttttatcaacaagacacacatgaatatggtctgatggaggtgtataaatgatttctttggtcattatagccgtttcattgataagaacaacagattcccaaagattggctccaatatagagatcaaactcaggtgttttactaaaaccatcatagttcccgtacataaaacgagttctaatcagatacttgaaacctttcccttgctgaggccttatgtcgtaacagtttctcttaccttcagggaagcttcttacgttttggaactgcctttcaagagaagttgtttgaaggtcagagactatgctatgacttgttccagactcaacaaaacccaaatccgaaacgtatttcatgtttgttttctcatcagtgtagcttgaatcatctggtatcccacaatcgatactaataaaacctgtattgaaatcacaaaccttagcaataaccaacatatagaagtgtttagaaaagcagagacatctgagtaccaatttacctgattggtcttgagcaaaaacgagacaaacacagctcgtgattgaaatccatgaaagaaggcgtagacgtgtcattatcaccaaatgtgtttgattactttcttatggaaaatgttctctcatgcaatatatagacgaggcaagatcaaaaggacagctactacacgtacccgcttcaactccatctaagttatagtattagcatgttgggttgatatacaattacaattacagttacaatacatatataaacaaaagtcaaataaaatccttgatttggtttggtcccttgaaaattatacttgcaaagttgacgactagtaaacaaaagaaatacaatcttcttttctacaggaaaccttttgtttataattttgcaaaaaaaacctttaatagttgcaaggggcagccgctacagaaaacgaatataaaatcgtttctaaaggaatttgccataatcaggcctgtattggtctcctatctcagaaactatgatcatccaaaacgaaatgtgtccatcagatcgcctgcaggtttcccaatgatttcaccatgaaacattcataagcagattacatgacaatctataggatgaaccgtattcttgtaactgtataggcatgtaatattaaaaatgtcatttctttctgatagaaagagagtttttacctgtccgaatactaaaataaatcttctttgccaccataagtctaaggagatttaggttgacttccagtgtcgttcctgttctgcatgatgtcgacctccatgttaacttctaactcttttgtagatgtggaatcatctatcattcagaaacaaatgacaaaaatatatcaccaaagacaaaaacttttgtttacaacattattaacccaggaaaatttataaaagagaaagaaagaaaaattgctattgctcatctacagttgtctgtgttttgaaaagagataatacattggagcccatgcgtgtatgcgattttgctagcttgtttcatcaatcacccatcataaccaagaacttgctatattctacaccagccacacaagatcaaagcagaaacgttgcctccctcggcatgttgttcttacatagcgaaactgctgtatcgatctgaagtagatccttaaagttaggcttatgattgtatccgccaatcatccttttgaccttcttcttctcagcattgcgtcgcatacttttgctgcgtcggcgttatgtctaacattatgaactctgatgatattggcacctcctagaatgcctgcagtgacagaagcaacagttgcagcatctctgtcagtggcctcaggtcgcccacaaatatctcccagaaatcttttccttgaaggtcctacgagtataggcgcatgagaaactgctatacttctcttagccatctcttctcggatttttggaagatccataataatatctagattatgatctacgctcttggaaaacccaatccctggatcgatcataaccctccaagctggaatcccagagagttctgcatctcttactctcaagtagagttcagaagcaacatccttgcagacatcatcatactgcaaattctctttgttctgcattgtacatggatctcctctcatgtgcatggccatataaggaaccccagattctgcaacaaccttatgcatattcgggtctaaggttcccgcagatacatcatttagaatgtcagctccattgcttattgcttctgaagcaacctcagagttgaaagtgtccacagatatgagcttttcctccatctctggcataccacgaacagcctctaaaactggtagtagtctatctaactcttcttgactagaaattcttgaggccattgggcgtgtggactgtgctccaatatcaattatatctgcaccctcagagatcattgagcgaacccgagaaactgcagaatctattgattgaaatttccctccatcactaaagctgtcaggtgtaagattaagtatacccatcacatgagttttgttagaaaaatcccacagcttatctcctattggtaaaaccctttgtataccatcttgtccaatcagtgactcgccacccagtctctcccacgcttggaaaattccaccaggatgtatcgcgagcgaatgccaatgagcaactgtatcattatcaacagctgatccaagcaaatcaaccaaaggtgctaacacaaatgacctttcccagagtctctcatgtggtatgatcagcttatcagaactaattctcatcttcccatagaacaatatgtccaagtcaagcggtcttggtccatacctaataccatccttacgtcccatgtctctctcaatagtcttgagaacacttaatagctcatgaggtccaagcttagtgacacctctcactgcagcattgagaaacctgggttggtcagtcacatgaaccggagccgtttcgtacaaacaactgtgcctggttacacaaatgccaccacgcttcatcaatcgcaaagcctctctgaaattattcatccggtttccaatgttacttcctaaagcaatcacaacttcatgctctgtagattgtacttcgatagttgtacttgttgccgaagatgagaaagctgagttacataatgctgcaacaacaagtcacaaatcacacacctttaagaacttttctaattggcaaaatcaaatctgcagtggaatcaaatcatctagcaactctcaaagaattgaatcgttcacaagcttccacattcaagaactagctgagacttttatttctaaatcaagtcatgtacaatgaagtgaagaggaagctgaatttgtcaattgcagatacctggaggactgaataaagaggaacagtgcaagccaagtggagacacgagagaaagagacttcgacgaatagtatcgatggaagcagacgcgactcgcagccacagcagagattactgccggaggtggttctaagaagcgacggagaaggaatctgccggtgtgtattaaggtttgtgacagcaaaggagccatcttgggaaatagaaagtagagagagatagagatagatgcaatctgaaggttgtgctgatgatgactgtcgactgaggaagacgatgctggtgaaacgggtaccaactgagatccgtatttctaactcggactagatccgacccgtagaatgcaaatgcaataaccaaaaaaaccataattatttaaaatagcggttctcgatccgttccgacccgaattaaaactgtaccgaatggtcgattattaattgaaaccagtcccgataaaccgggaaatattttgattaaacttgaattatgaaaataaaccgaatctaaagcaacgcaaaatcaaccgaatatcattaaaccaaactggataagacaacccttatttaaccgaaatcaaaccaacgattcctttattggcaattctacccttctctgttgttttttatcttcggaaagtctcatttctcgatccccaattcgtggattagggttaaaagaaccatttttattctcgtcgcgcaacaacaaatccagatcgaaaaaggaagaagagatcgaaatggcgttgagaagggtttacagtgaaatcagagggaagaaggtgacggagcttccaggctatatcaaatcgactttttcaatggagaccgtgaagacctctgtgaagagaggactcgataactacaacgaaaaatacattcagaccagctccgttgatcctatccttcatatctgcttctacggcatggctttctcttaccttgtcgctctccctaatgagcgtcgccatcttgagcatcagcagcatgctaaggagcacggtggtcattgatctcgtgggaatcgtttcgatctcgagatgattttaggtacttctgaatttcgatccttttggtttatcaaaatttcggttttttggataaatatgtatcattttgtgtattgagatttggggattttgcatatgtgaagtgatagatttctaaggatgtagtagtatctgcaggttccatgaatgtcaaatttgctatctttgtttcgatttcgatgttatccattgtaaaggattcatcttttgttcttatatgagttgatgaatagcaaaaaacttgtgggttttctcaaatctgtaaatgggttaaaccattatcaaaattctctctgatttcaaatggttgaaatgtgtagttgttgccaccctgatcatgtttatagcttaaccaatgtagggtctttggtagttcctgtattctctaatctgttaatgggttaatatctttctcaaaattctctctgatttcaaatggttgaggtgtgtagtttggacacactgtgactatgcttagcttaatcaaatttggtttctttggtatggtagctccagtatcataccacattgattctcattgttctttggggaattgatggttgaattc

SEQ ID NO: 646 - DNA, 93953 bp, Arabidopsis thaliana
gaattcttcagatctcagattgaagcttatcagagataacagtttatgattgatcctagctacataatacacaaccccatccatacatattcctttcttttcaggatcagctagataatggtgatgcttacattcaatcattctccattcttgtttagctcctagagtgaaaacttgatgctcctctgtccgaataattctaatatcatctatgaaatgaacatatagttgcgtcatgcacaacactttgtatagatcgttaacgggatcatatccaaaaaatgatactctatctatatatgaaccttttcttagttttgagtttaggcaaagttacgaattgaccagtactaggattcccaatcaacactttagtaccatttagacagcagatcaagccccggacgggtggagaaaaccgatactctagatcatgattcaaagtaacagctaccctgtgatgatcacaagacgggccctccaaggagctggagtgcaagaactgcatcttgagacgggagactgagacttgaaaaagaagacgaggcagagtggaagatcgagtcaggtacaactccgtgatatctttgtcgaggatgatcgatgaccagtgtttcgaaacgaagatgagattggctatggatttggccggcaatttcaggagaatctctatcatcagctccagaggaatattcgaaaacagatcgttttcttcactttggtcttgtttcttatccatggggagttttcagttctgctcactttttttttaacgcttgattggttaaaccctaatcgtccttatattttttgcaagtcgaaaccctaatatcaagaatttttaagaaaaaaagttaacaagggttcgcttaattaatcgccgagaaaaacgtttaagccgatgaattattagtccgatacaatacacttaacttactacaagacaaagctgatgaaactgaggttcggaagtggaacgagaggaagttgagtttgagtaatttgttcttgccttgcgagatttgtagagttgtttatatattgagccgctaaaaacacttgggctaaatattgaagctaaattctgtttatgcacgtgaagagtaatactagtgtggagaatcttgcaaaatccctgagttttagcctatctcaaagtccttgcgtaacacgattcctctgctgatgagctttttggttattcccttttatttaataagtcggtattgcggtttctttgtttattttctacacaaatttggaataaaacagatctacaaaatctatcctaccttttttgttttttgacatatatcatcataccttaaaagtttctaccttatatagaacttacataattcgtacgaaaactaatttatgggatattcgatctatgttaatacttttttggttaaataatagctgtatactgtatgtagcaggattggccacctaattttttttttttagttatattttacacatactaaaatctcatttatagtccattcttttttttttttttacctaacattgatattggaaacttataactttgataatggattgcaactaactcgaggtaattatcagttgttaaaaaattcactttatgggttatgacttatatgagattacagtatctttgaatcctccgactccaatttcaactatagttcaccactaatgtaaatgttttaaatgaaaagaaaactggtacgatgctataaaagaaaaggagcggaagaaagtgaaaaccaaaccctagtttcggtgtcaagttcgttgttaattatttgaaagtgtattagtaaaagtagaaagaaacaaagtggagaagcgaatcaaaagtaaataactatatatcgccaccaccgtaacgagagaagttaaatggaaaagccattcgatggataactatagtaggagagacgaataaatctggctcagagatgagaacaccatcaagagtaaaaccagaagctgaattgttggtaacgactatagagtgtccagagaggagtgtagggatgcgagagaaaggcatcatgagacttatgacggagaagtcaagccattgtggaacaatatggtaagaagcaactagtggtgacgtggcgttgattccttccacggatgttttggggaggaagagagttgaagttaggactggaccgtttaattcgtcgttgttgttgaggaacgctccgctccaatcttcgaaagagccacttgagaccattgcgtctatgattttggttgcgatttggttttgctccgtcgtgagaaatggaagtgaagtggaagatgtaatggtgatgatagcgatgatgaggaggaagaggaggaggtgcttggtggttgccatggaagagaatatgaggtatgaaaattgttgtagtgttggagggttcttcttttttgtttatataaaagaataatctgttaggtgaatcatgtaaattagttttgtatttggttgtagttggagaatgcaaagagctataagtattttcaagtgcatttaacatgattcatggctgattttgaatgatactgatagtaacggtaatgatgggatgataatacactgatagttttatgaagatacaaatatccatctttacctcgcccgaggaaccatttcagtatcgaggttcatcgtaaccattctcacagggtccttatggtcacttcgattgttcactctcccaaagatactctgtttcagctccataacgacttggctcattgtcggtctttgttctgaactctcagacgcacaagccaatgctagttcagtgatcttccaagccgagccaacctcaaatctatctcccagacgttgatccacaataccttttatgtctccattcgccaacattgaaccaacctgatcacttagatgcacactctctgttcttgaatgccaaattgccggttttcctgttattacttcaagaagaaccaccccgaagctgtaaacatcactcttctcgttcatttgccgcgttgcgtaatacctgaatttaggcaataaaaggatttgaacacatctggttaattatacatctagccggaatcacgaatttagattctaagagaaagattatcattactcagggtctaagtaaccgatggttccagcgacaacggtggagacttgactactaccttcgactgggaagcttctagataaaccaaagtcagctatcttggcttgaagattctcgttcagtaagatatttgccggcttcacatctctgtgaactatgggaggcttgcaaccgtaatggagatactcgaggccttaatcatttgaaaattctcattcagattgcgtaaatttttaaaaagaactaattttgtgttttttgattttacaaaccttgtgctgcatccaatgatatctgtaatctctcttcccagctcaagattaaggaactttttcctttacaataaggaaaaaaaaaaaaaaaaactgaattagtttagttgcttctgttaatacaaaagggctgtgagtttattatctaaagactaacctgacaaatagtctcctaagtttccattagccatgtactcgtagataagtgccatgtggttatcttcattgcagtatccgataagagatgtcaaatttgtgtgatggactctcatcagaagctcaacctgagagaatatagattagtttggactttggatgcaaaacattattaggaattacagagaaatgatgtcttaacaagtaatttagagaatgacctctgctcgaaactctttgtaaccttgagttgactcttcggaaagtatcttcacagctacttgatctccattcaagaaaccatggtatactttaccaaaacctcctttaccaagaactctctcgaagttgtttgtgatattcacaacttctgagtatataaagtatcttttggctgtgtccaatggtccggtgttgacacctaatggtttgtttgagattgtacctcttcgtgatcgttttttaaaatgccagatcaaagctaatgcggtcaaaacaatgagcaatcctgcgagtgatgctactactgggacgatgtaaccaattttcttcttcgttgttgtttgacatgagggagactgacaaaggtccgggtttccaccaaatctaaagtttacaaaatagaaacttcagtctgtatctttcgcaatagaaacggttcaaactacctcacatagcaacaagcaaggccatcctttctagattgcaatacgaaactaaattgatgaaaatgcacacattatgtttcagagctcattgagatgcatacctaagcgaaagagaaccatcttttgatttctccaacagtttagctggaatcgaaccagttaacttgtttccttccaggtttctacaagtataagcacagaaccttgtataaatttcacatgtaataaactgctactggtttataaatctcaccactatagtatgcacgactcacaattcagtcaagtttggtaaactggcgaggaaatcgggtactttccctgttaagctgttgtttgataagtctctgtaatgataatttccttgtgtcagtcaaaagtttaaataccattgagtgcacttatgttgattacaaagagattagaaacactgacaatttatttattgatgttaggttggcgaaagctggatcaatctggccagtcagtccactggaggataagttcctgcgaatcacaacgttgtttgagatacatgtaacagcaagagcagaacagagaaaagcagagcagttgtgaactgaaaaaattcttacagagcaatggattttggagaagtattattatcactatggagacattcaagaccttcccaagaattgtccactggaacacatgggtctccttgccagttcttctttactctatacttgaacttaatcttcgtcatggcatcaactaagacaagataaaacaaaatcaaataaagtacagaagaggaaatcttttgagtcagaaagccttaccatcctgttgatctgttggtaactgaaggaactcgttgatttgatagatctctatagcgttgatgatcggtggaagggtcgatacaccagttctctgaaggacaatttcattcatttttctgccaactggatctacagtggagcgtgtgtctgtaaacaaataaaaaggacggaaattctcggcaagtataacgtcatttatgtatatatcgaattctcgtgtctcgtttctttgtagctctcgaacttcagcgaagtgcatgtatatataaaacttcgacctcggatcatctggtgcccagttaaacttcaagggattgctttcgtttccaggtgctatcgcagatctcatgactatactagcaggtctgaaaccgttgtggttagtttcatcgatggtgagggatgtattcaaagttttctggtacggagacttataaggcatccatatgcgatcatagaaatcatctttgtacctacaaaacgattacatttagcagggagaatataacaacaaaagaataagacatgttttcacctgatttgaagattggtcgctgtgccgaaatcccatcttcgaccaagcataagcgcttcataaggagtgtcatatgtatcgttcttcaaaaatcttatttccaagacagagagaaaaggagttcctctgtttttatcaacaagacacacatgaatatggtctgatggaggtgtataaatgatttctttggtcattatagccgtttcattgataagaacaacagattcccaaagattggctccaatatagagatcaaactcaggtgttttactaaaaccatcatagttcccgtacataaaacgagttctaatcagatacttgaaacctttcccttgctgaggccttatgtcgtaacagtttctcttaccttcagggaagcttcttacgttttggaactgcctttcaagagaagttgtttgaaggtcagagactatgctatgacttgttccagactcaacaaaacccaaatccgaaacgtatttcatgtttgttttctcatcagtgtagcttgaatcatctggtatcccacaatcgatactaataaaacctgtattgaaatcacaaaccttagcaataaccaacatatagaagtgtttagaaaagcagagacatctgagtaccaatttacctgattggtcttgagcaaaaacgagacaaacacagctcgtgattgaaatccatgaaagaaggcgtagacgtgtcattatcaccaaatgtgtttgattactttcttatggaaaatgttctctcatgcaatatatagacgaggcaagatcaaaaggacagctactacacgtacccgcttcaactccatctaagttatagtattagcatgttgggttgatatacaattacaattacagttacaatacatatataaacaaaagtcaaataaaatccttgatttggtttggtcccttgaaaattatacttgcaaagttgacgactagtaaacaaaagaaatacaatcttcttttctacaggaaaccttttgtttataattttgcaaaaaaaacctttaatagttgcaaggggcagccgctacagaaaacgaatataaaatcgtttctaaaggaatttgccataatcaggcctgtattggtctcctatctcagaaactatgatcatccaaaacgaaatgtgtccatcagatcgcctgcaggtttcccaatgatttcaccatgaaacattcataagcagattacatgacaatctataggatgaaccgtattcttgtaactgtataggcatgtaatattaaaaatgtcatttctttctgatagaaagagagtttttacctgtccgaatactaaaataaatcttctttgccaccataagtctaaggagatttaggttgacttccagtgtcgttcctgttctgcatgatgtcgacctccatgttaacttctaactcttttgtagatgtggaatcatctatcattcagaaacaaatgacaaaaatatatcaccaaagacaaaaacttttgtttacaacattattaacccaggaaaatttataaaagagaaagaaagaaaaattgctattgctcatctacagttgtctgtgttttgaaaagagataatacattggagcccatgcgtgtatgcgattttgctagcttgtttcatcaatcacccatcataaccaagaacttgctatattctacaccagccacacaagatcaaagcagaaacgttgcctccctcggcatgttgttcttacatagcgaaactgctgtatcgatctgaagtagatccttaaagttaggcttatgattgtatccgccaatcatccttttgaccttcttcttctcagcattgcgtcgcatacttttgctgcgtcggcgttatgtctaacattatgaactctgatgatattggcacctcctagaatgcctgcagtgacagaagcaacagttgcagcatctctgtcagtggcctcaggtcgcccacaaatatctcccagaaatcttttccttgaaggtcctacgagtataggcgcatgagaaactgctatacttctcttagccatctcttctcggatttttggaagatccataataatatctagattatgatctacgctcttggaaaacccaatccctggatcgatcataaccctccaagctggaatcccagagagttctgcatctcttactctcaagtagagttcagaagcaacatccttgcagacatcatcatactgcaaattctctttgttctgcattgtacatggatctcctctcatgtgcatggccatataaggaaccccagattctgcaacaaccttatgcatattcgggtctaaggttcccgcagatacatcatttagaatgtcagctccattgcttattgcttctgaagcaacctcagagttgaaagtgtccacagatatgagcttttcctccatctctggcataccacgaacagcctctaaaactggtagtagtctatctaactcttcttgactagaaattcttgaggccattgggcgtgtggactgtgctccaatatcaattatatctgcaccctcagagatcattgagcgaacccgagaaactgcagaatctattgattgaaatttccctccatcactaaagctgtcaggtgtaagattaagtatacccatcacatgagttttgttagaaaaatcccacagcttatctcctattggtaaaaccctttgtataccatcttgtccaatcagtgactcgccacccagtctctcccacgcttggaaaattccaccaggatgtatcgcgagcgaatgccaatgagcaactgtatcattatcaacagctgatccaagcaaatcaaccaaaggtgctaacacaaatgacctttcccagagtctctcatgtggtatgatcagcttatcagaactaattctcatcttcccatagaacaatatgtccaagtcaagcggtcttggtccatacctaataccatccttacgtcccatgtctctctcaatagtcttgagaacacttaatagctcatgaggtccaagcttagtgacacctctcactgcagcattgagaaacctgggttggtcagtcacatgaaccggagccgtttcgtacaaacaactgtgcctggttacacaaatgccaccacgcttcatcaatcgcaaagcctctctgaaattattcatccggtttccaatgttacttcctaaagcaatcacaacttcatgctctgtagattgtacttcgatagttgtacttgttgccgaagatgagaaagctgagttacataatgctgcaacaacaagtcacaaatcacacacctttaagaacttttctaattggcaaaatcaaatctgcagtggaatcaaatcatctagcaactctcaaagaattgaatcgttcacaagcttccacattcaagaactagctgagacttttatttctaaatcaagtcatgtacaatgaagtgaagaggaagctgaatttgtcaattgcagatacctggaggactgaataaagaggaacagtgcaagccaagtggagacacgagagaaagagacttcgacgaatagtatcgatggaagcagacgcgactcgcagccacagcagagattactgccggaggtggttctaagaagcgacggagaaggaatctgccggtgtgtattaaggtttgtgacagcaaaggagccatcttgggaaatagaaagtagagagagatagagatagatgcaatctgaaggttgtgctgatgatgactgtcgactgaggaagacgatgctggtgaaacgggtaccaactgagatccgtatttctaactcggactagatccgacccgtagaatgcaaatgcaataaccaaaaaaaccataattatttaaaatagcggttctcgatccgttccgacccgaattaaaactgtaccgaatggtcgattattaattgaaaccagtcccgataaaccgggaaatattttgattaaacttgaattatgaaaataaaccgaatctaaagcaacgcaaaatcaaccgaatatcattaaaccaaactggataagacaacccttatttaaccgaaatcaaaccaacgattcctttattggcaattctacccttctctgttgttttttatcttcggaaagtctcatttctcgatccccaattcgtggattagggttaaaagaaccatttttattctcgtcgcgcaacaacaaatccagatcgaaaaaggaagaagagatcgaaatggcgttgagaagggtttacagtgaaatcagagggaagaaggtgacggagcttccaggctatatcaaatcgactttttcaatggagaccgtgaagacctctgtgaagagaggactcgataactacaacgaaaaatacattcagaccagctccgttgatcctatccttcatatctgcttctacggcatggctttctcttaccttgtcgctctccctaatgagcgtcgccatcttgagcatcagcagcatgctaaggagcacggtggtcattgatctcgtgggaatcgtttcgatctcgagatgattttaggtacttctgaatttcgatccttttggtttatcaaaatttcggttttttggataaatatgtatcattttgtgtattgagatttggggattttgcatatgtgaagtgatagatttctaaggatgtagtagtatctgcaggttccatgaatgtcaaatttgctatctttgtttcgatttcgatgttatccattgtaaaggattcatcttttgttcttatatgagttgatgaatagcaaaaaacttgtgggttttctcaaatctgtaaatgggttaaaccattatcaaaattctctctgatttcaaatggttgaaatgtgtagttgttgccaccctgatcatgtttatagcttaaccaatgtagggtctttggtagttcctgtattctctaatctgttaatgggttaatatctttctcaaaattctctctgatttcaaatggttgaggtgtgtagtttggacacactgtgactatgcttagcttaatcaaatttggtttctttggtatggtagctccagtatcataccacattgattctcattgttctttggggaattgatggttgaattctatatgtgaagttttctatagtgatgtcaagaagtatcagtttctaatgcatggtgcttttgattatgaatgcaggggggttgctgtgaaatctttctctgcttgatggtgacgacgactcaagaattgtgtcttattgtttcgttttcttgaattttcctggataatgttgacctaaaggaaaacctttctttcgaattacactccatgatagtcaataattgaagcatcatgatgatatccatgaataatgaaactttttttttgttccgtgaagttgtgaattcagcaattgttttatcatatttgatcgattcaatgcttggttccagctgaagatgatgcatacttaaatacaactatctaaaaaaactgaaccgttcgaacattattttcgatgtaaatcttgtcttgatcgtcctctattcattttcctacgaatcaaagacttttatgataagaaataatggattcctaattcaaaataattgggcagtagtaaaacagtagttaacccaaaataaaaaagataaatagtgaaacatccaaaagtccaaactcttttacctgtcatctattggaccaaagtagacgtcctcatatgaagctaaaacccaatgataggcgaatgggccagattttacctagccatataggccttatgcagaaatttttggtcgacattatatagacaaggatatgcttcacatgcatctcgttccaaggatttaaacatagaaaacaaactactaaaatgttggtattagcagttatgaggaaggtatatataataatacaacatgataatgatgtatgtgcactagtgtaatcattgaacgtatagatttagtaattccatgaagttgtttgatcctcacacaagtttagtcgaaatcacttttggcagtattatagtgatatcttcacgggaacgctaaacgtcttttcctttctcatcatgttactagatgaaacaacgtatacgctaattaatagtagatggcatcacaatagtttcgtcttgattaagtgataactcgaacttaacacatattttactgccatcaagtctctaaataattgtttagcaaaaaaaaagtctctagataatcttatttttacgaccatgagttactacatattcttagggaaatggtttatgaacttaatcgaaatgtgaaatcatagtagtcccaaaaaaagatagaatttgacacaagatgaatgttctatagatgcatacctatcattaatgatacttcatactcagttaggttataaatttttatacgaataaataaaaggcccatttaataatgaagggttgtgtatatggatgacagaaatactaaattcaatagcatttttgtcgttacacctaatttgaatatccatttataaatgattgttatatatagactcacgaaaagtaagttgtcacgatttcgcacataaacgaattctgtcccttttggaccgaaagacaaatctaaagttacttttaaaatcatcagcaacaaggttttccataatcagtgggtaaacaaaaataaaacaaagaatatttcctcttgaaaaaagttcttaaaactgtgtataaaaatttggtttttgctagtgccggcgaaaaatccatatatagcaagttcggcttaaattgttactgcatattcagatctgcataaacagataaaactcttcacatgcaaaaaaggggaaagaaaaaaaaaacaattagcgcggtaaatgatgtataaagatcaaataagtgagacgtttatttttggtaggtgtaagaggaatcaaagttttggacaagaagaagcgtcaaatgacacatgatgtgtttcgactaaacgacatatcacctgggaacaatccttcacatgtgcctttcgatgttaactttatacgaccacatacctccaattacattactacatcacaaataacttcgtattctcagttgtcactattaatcttcactacttatgtgataaatctcccgtgttctacgtactatagtttttaaacttaactgaaagtcttactacgaaatatattattacatccattttagcgaaaaaatgttgtttttatatcaagactagcatttcttcacatacgaattacatatatacatttatgtttatgatccattcaatatttttttttgtttgtatgaaaaggtcgaaacaatgttggtgaaagcattaatttcttagtttgaccgacgataaatgatctacctgtgaattgattcgaacagaagaattttggaattggagcctggtaaaatagtttgggtttttacactttcatgagttactagtaatattttttgttggtcacaaatattatactcctcataaatctaaggacaacaatttttctaatcataaatatttaatactgatttttgaatgattcaagctttaaattactttatcctctaaaatattactcaaaattatgaaaactggttattttttatttaattaaaagtctcctaagaatgtagtattttgaatgaagaaaaatttcttatccaaaaaacctaaatttttaaaaaacaccatagtgtttttgaaatccgtaatctaagacacaccatgaattattagaggagtctctagtagggaccgttttatcttaataattactccagaatttgttgatctgtaatccaaaaaagaaacacaatcaagtggtaattaactgtgttcataatgcttttggagggaagccgcgttttatgattgaaagatgaattctaatcaaacatcattactcttagaattctaatgataattctttaggtcccctcaaagattatgaaattaatatttgtttaacttttttagttgtatacttttcttttacctttcatcaattaagtcaactatcttttctctccctccttggacttttcacgtatttatttgtttcttccacctatttttccgtataagttaagtataataactcctattcattaaattattttccatttcttccaaaaccaaaagtttttacctatgatactatcaaattattgatttttttttttttcattttaacattctactactaacgtgaaataaataaattacagagaaatattccccgttcttttgtcatcattatataaactcaatattcaatttcaactagattcactttattatactcttagatttttatactttacataaacctcgtatagtgtggtaaattcccactactaatgctacatgtatgtctatattaagattattaaaaacataaatctttttaaaaagctacatatatgtgtgagagtctccattatcaacggttcattgtctgctactctgattagcattttcttaaaaaaaagtaattagaaaaagaaaacaaacgaattaaaaaaaagaacaaaaaccctaataaatctctaaaaagtccacacacactaacacactctctctccgtctctcactaaaagcttctcacttacatttctgctttcattcattaatctctgtgtttccttcttttgatctttttggcaagatctctatttttcttccaaaaaaggaaaaataaaaagatcataacttcagaatcaaagtttctctttgttcacattgttctatccatctgcacatttgattcatgtagtgactaatctcacagtctcgttctcaaatttactttatctgcttgattcgtttcgtgaatccaagtaagttttacactttttgtttttgctttttggctttattctattcaagtttcaagtttaaaggatcctcttttactaatgtagaagcatttttttttttttgttgttttggtttctgggctttgttatattgcttattccttgcttggatgatttgtgaaagtgggttaattcttctcatctttaaacttttgatgtgtgtttataattttctcaagatttgtttttttttgtctttctctgttccactgattgctcagcaacagttgctactgtagtttctgtatcgtcttcaaacagttgaatttgtttaggtatatttgtctatagagatgttgagtttaccaatctacagtgtgattgaagtttccccaagtttttatctttaagttactttggagtagcctttctttatgtgcttgaatctcttctctgctcatttgattttgagttgtcagacgtataaagtttagtcttttatcactgtgaaagatagcaacactatctcataatttctgagaagagtgtggagattaacttgtgtagtggtttttaatacaattccaattctgtgaagtgattgttgttgttgctcaatatctgttgtttttcagggatgctaatgttatacattggattttgatactgcagatttagtctgaagagaattaagcttggcgcttctttggtgagaagcaagatggatatcgggtgtaaagttctcgtctttttcacatgtttcctcactgtgacagcagagatttacattgtgactatggaaggagaaccaatcattagttacaaaggtggtgataatggatttgaagcaactgctgtggaatctgatgagaaaattgatactacaaggtacctgcgttttctcttcttcaagtacagtcttattaacatctgactcaccaaaggcttttactacaatttccttagctttaattaggcatatatcattgatgtgtattacaatgttttggccaaaacatcttcttagtgttgtgactaacaatatgttacctttttttggcagtgaactggtgacatcatacgcccgtcaccttgagaggaagcatgatatgcttcttggaatgctctttgtggaaggatcttacaaaaagctttacagctataaacacctcattaatggttttgcagctcatgtatcccctgatcaggtgaaatccaattcgagatagtctctacaaattacatttcagtgtttaatctgtagtcccttacagttttcccctatattagtaggcggaaatgcttcgtcgcgcgcctggtgtgaaatctgtggatagagattggaaagttaggaaacttactacacatacaccacagtttttgggattaccaactgatgtttggccaactggtggtggttatgatagagcaggggaagatattgttattggctttattgactcagggatatttccacatcacccaagttttgcctctcaccacacaacagtaccttatggccctcatcctagttacaaagggaaatgtgaagaagatcctcatactaagatcagtttctgcaatgggaagatcataggagcgcagcattttgctgaagccgctaaagcagctggtgctttcaatccggatatcgactttgcttcaccaatggatggcgatggacatggaaggtttgtcttgttaattttttttaataatatctcagaactgcttattcctctgcacattttgatttgtatgcttctttttgttctaacgaaaaattggcctttcagtcacacagcagctattgcagctgggaacaatggtattccagtgaggatgcacggttatgagtttggaaaagcaagcgggatggctcctcgtgcaaggtagatagataattgatccagaaattggtggctttaaagacatttctgttcctgtctttcaaaactaaatgttgtcttgttttaggattgctgtttacaaagctctctaccgactttttggaggctttgtagctgatgtggtggctgccattgatcaggtaagcaagaacttagcacactactaaattgttccaaatatatgaaataatgtcttctcctgctgaatttgttctagtttcttcatagctctgcttctttgttctgttttgagaatcttcacataatctcttaaactgactacttccatgaatctaaacatgtatgcttttctgagcaggctgttcatgatggagtagatattttgagtctctcggttggtccaaacagtcctccagctactacaaagacaacattcttgaatccatttgatgctacacttcttggggctgtaaaagctggtgtttttgttgctcaagctgctggaaacggaggtccctttccgaaaactctggtttcatacagcccttggataactactgtggctgctgcaattgatgatcgcagatacaaaaatcatctgactcttggaaatggtaaaatgcttgccggaataggattatctcgtaagtttctcctttctctgatctagatatgtagatccacacaatagtaatttatttaagaagagactgttagtttattctgagtctctctattggttttttgatgaatcattatgcgtttgtgcagcttctactcgacctcatcgttcatacaagatggtttctgcaaatgatgttctgcttggttcttctggtatgaaatacaatccgtcggactgccagaagccagaagtcttgaacaaaaaattagtcgaaggaaacattctgctttgtggatattctttcaatttcgttgctggttcagcttccatcaagaaagttgctgaaactgccaagcatctaggcgctgctggtttcgttcttgttgtcgaaaacgtttctccaggaacaaaattcgatcccgttccttcttgcattcctgggattctgattacagatgtctctaagtcaatggtaaaatatagttttgttgcgttcactatacagttatttcctccctcgtcttttccttaacttggaatgccattttttcttctctaggatttgattgattactacaatgtcacaacgtcaagagattggatgggaagggtaaaggactttaaagctgaaggaagcatcggagacggtttggaacccattcttcacaaatccgcacctgaagttgctctgttctcagctcgaggacccaataccaaagatttcagctttcaggatgctgatcttctcaaaccagatattcttgctccaggctctttaatatggtctgcctggtctgcaaatggaacagacgaggctaactatatcggtaagcatttccaaaaatcttgtcagaattatccataagtactctagaccaagaacctaaatgtttagtttttgactattgagcaggcgaaggatttgcactaatttctggcacaagcatggctgcaccacacattgcgggtattgctgctctggtgaaacagaagcatcctcaatggagtccagctgccattaaatcagctttgatgacgacttcaacagtcatagatagagcaggaagacctctccaagcacaacaatattctgaaacagagacagtaacacttgttaaagcaactccgtttgattatggaagcggtcatgtcaatccaagcgctgctctagaccctggtctcatctttgatgcaggtaaatactcttactccattgacataaacctcagttttcgtcactccctcttcaatctctggtcactaggatactcattggttttattcttgtatggccatacactttgtgattgattgaattttcttgaaggttatgaggattatatagggttcttgtgcaccacacctggtatcgatgctcacgagataaaaaacttcacaaacactccatgcaatttcaaaatggttcatccttcaaacttcaacacgccatccatagccatctctcatctcgtcagaacacaaaccgtaaccagaagagtgacgaatgttgcggaagaagaagaaacatacacaatcacatcgaggatggagccagcaatcgccatcgaagtgagtcctcctgcaatgacagtaagagcgggcgcttctagaaccttttcggtgactctaacagtgagatcagtgactggagcttatagcttcggacaggttacattgaaaggaagccgagggcataaagtgactctccctgtggttgctatgggacaaaggcgataaagaaaacatatgagattttgtaacattattattgttattatttttgtaatatgcagtaataataagaaggtagttctgtgtcttgagtaagaaaagaataatacagtttgtataattagtttataacttttgtatctttaaactccattataagggataatagtaatatgattaaatgatatacataaatatgcattagctttgttaattactgatttcataacagaacatatgttccaaacataaaatcctctgttttagctctgttattactctaaccaccaatcttgtttttttccgaaagattttttttggagaaaatgtgatttaaacgttctttgcatggttcgaactctttttattctaatcttgaacttaattacatgtaaagattctaatgagattttgcgcagaaagaacaaaacaaaaaaaaaaaatattgaagtgttaagaatcaataatctcacaatcagttctctggaaataaaccttcatggttcgaagattatagccaacattataattctgctgagccatggcaccaataacgctcatatcatcaaacgtgttcatagtcatagccaagcaaaagctatctccactttcactactaacgaacaaactctcaacgtctaacgccagctcagcgccgccggcgaaatggaacgtgacgacgggaaagccgtagagatcaagtttaagattcccttcgtagcaaggagtcgtgtattgatcccaatctttaacgcgtctgagaacttctcctagaagaaaatcaatttcttcagagagagtttcgtaagcttctctggctagaatcgttggagaacagcctgtgtcgatgaccgtgcctccttgggaccgatatctctggaaagttccgggttcgatatcgagaagtttctctccaaaggagattgcttggaggtcaaggtagtaacggtcttggaatatttgtaaaggtgttggatcgccttcgattttggcgccgtttccgaggattagaatgttgtgagggtaagtcggattggttaggctgccgaagcagtacgagaacttagagccgaaattgcgggttactatggagaatgtacctggacctaaaccgagcacgccgctatatttggtgaaaccggagttatcttgtccgcatccgaaaacaatgttttgtttagagattaaaccgtcgtcagatgtttcaaatgtgagtttttcctcagctaaaatgcctctggtgttagaaaagtcgcggtagcgtaggtgatattggcagtttccagtcttttcgtcgcgaaagatttggggcatggcgtgtggtgcggatacacaagaagcgtttcggtaagtggaagatcttgaagggtggaaaaaagggattgtttgagggtaacatttgcagggaagacaatggatccaagttaggtcactacctgtatctatgagtaagagttgcgggacaggtggattgccgatagaaatatttgcaaggaatgctgctggattcggaataggagtgacatgtgagacggtccacaagttatctaggcgagaagcgggggttgacttggaatgcaagtaaccgattttgattttcgatgattcttgggttttggttcttagcgtaagtcgggaatgcgaggtgcattcctttgaacaagtgagagcgaatataatgataagaagggaggcacgaatacgtaatggtagtagagtgatggccatttgataatcaagaatgtggttttcttccaatcctttaaatatgagtctaaagaagaatggcattgatcactctttgtgtgaactttttttacgtatgcaaggtttcttttctagcatgattcattgattttactaacacaacttcaacacataccaatctgattatattctagctaggcaaaaagattacgttaatgtgtatctcacgtgtttagtctagtgtagaataagatatcaaaactctgttgattttattgattcacaaactattggtatttatatacaatgatctctgataaacataaatccctaaaatataggttataaactctatcaccaaagatattgtacgaatcctaagatattaatatctcaagaattaccaacagctaaacgaaataatattgtttacatcgcttggacaggtctatattattcaaaagaaattagcactaatcagaagaaaaaaagtttcaaacaacactgatttgaataatccaactaaacaataagaaaagaaatcaagtctcaaacaaattttgaaaacctagcagaaaacctgcttgcgatgcaaaagaaagctctaaaagataaatggctaatcaaaaaagagagacctaatagaatcaaaaggacatcaatcctccatagccaatcggtgccgtatatgtttagacgcttggtattcaagtaactatagtaggctgatttcgcattctcgttgattaggttaccaaagcaagccgatttggcaacctggttgattaagtcatcattatcctcaactttgacatgacctctttggacttgttgactggttccgtcaatgaagtctgatagatcaatattaagcatgcgagcctgtgaagctcctaccaaaagcaagacgaggaagacgaaaaagaagaagaagctgaaatttctcaatcgagtgcacatagctggagataaggctagttagggtttgtttttctgacgcaattgatcatacaatgagtactttttatttatttatagtttcctttgtctgttagggatttgctttatcacaaaaattaaaaattgttaggaatttggtttatcacaaaaattaacaattgttttattcgattttattttttatatatgacatatagcacaattttattggttaaatagttttcgatacatcaaatatttggataactttttaactatcttttatgatttagttttttttttttttgataatatttatgatttggctaagatcttttttctttaataatacctttatgatttagtattgagtatataaaccgcaagtcaaatcgaaattggacggcaccgtcaatgttcacccaccgctgatcaaatcccctgcaccctcaagaaaaccaagtcaaaccgaaatatgaaaaaacaaattaggttatgatctgataaaaatcccctgaccaaacttgtcacgcaaggaatggagaaaggctaaaaagatttttttgaaactaacagcttccccattcctttcggataccaacatatcttcaaacacgatttaactcattttgataaatgtatatcttcaaacacaatttaattcagcaaaaagaggaatacgttcatggatctcatgtgtttagtcttgattccattttttttatcaacgtatcacgatcatggatattgactctttgtgtgaacttctttttcgtatggaaggtttctttcttgcatgattcaatattttaggcaaaatgatactttcatgaatctcacgtgtttagtcagattcaaatatgttttcaacaaaaacagtaccacgattatatctcaacttttgtttcgttgttttctatattttcaaagaataataatcatagtatcatgatcatggataccacataggtgttttcagtaaactaaacaaacagttcttgccaaagatgctcttcacacctcaacacttcatgctcagctaagaatgtaaagatccttttgcacctaaaattctaaatggaatatgttattgcatcttctttaggccttcctgttttggttataacatcattgtttcgaacttataaacactctcttcgttactcatatagtcaatgtgtatgtgaagtgtttcaaagatggcgattttctttacatctcccctcttctttctcatcatcctttgtttctctatctccgtggttcacttgtcagcatcaccaactcttgttctcaatctcgttcattcctaccacatatactctcgaaaaccaccacatgtctatcatatcaaggaagcgtcggtcgaacgtctagagtacttgaaagccaagacaactggagatatcattgcacacctttcccctaacgtccctatcatcccacaagctttcttagtgaacatatcaataggtagcccaccaatcacacaacttctccacatggacacggctagtgatcttctatggatacaatgtcttccttgtatcaattgctatgctcaaagtcttcctattttcgatccttctcgatcttatactcaccgcaacgaaacatgtagaacatctcaatactctatgcctagcttaaaattcaatgcaaacacaagatcttgcgagtattccatgagatacgtggatgatacagggagcaaaggcatactagctagagaaatgttgctgtttaatacaatctacgatgagtcttcgtcagctgctttacatgacgttgtttttggttgtggccatgataactacggtgagcctctagttggaaccggcattctcggtttagggtatggtgaattctcgttggttcatagatttggtaaaaagttctcatactgctttggaagcttagatgatccttcttatccacataacgtcttagtcttgggagatgatggtgccaacattttgggagataccacaccgttagagatccacaatggtttttattacgttacaatcgaagccataagcgtggatggaatcattctcccgatcgatccacgtgtattcaaccgtaatcaccaaaccggtttaggcggtacaataatcgacacgggaaattcattaacaagcctagtcgaagaagcttacaagccattgaagaacagaattgaagatatttttgaaggaaggtttacggcagcggatgtgagtcaagatgacatgattaaaatggagtgctacaatggaaactttgagcgagatttggtcgagtctggatttccgattgtaacgtttcatttctcagaaggagcagagttgtcattggatgtgaagagtttgttcatgaagctttcaccaaatgttttctgcttagccgtgactcctggtaatttgaacagcattggtgcgacggctcaacagagttataacataggctatgatctcgaagcaatggaggtttctttttagagaattgattgtggtgttctctttgattactaattaatatttatttttttggcaactatattcaattaattatttgtttaaatcacgaaaatatcgtgcaaaatcttatagatttaatttttcataactgtcaatatatatctacaagaaaattcttgattgcctgaaaataagatacaattgttagtagttacattttcattgttacttggacagttcgatagtttcaaagaaatgatgtagcacgaatcataagtaaaaatgcttggaacaacgttgaatgaataatccaaaaaaacgataacaaacgatctcaagtatcatatagattttgaaaccttagcagaacatctgcttgcgatgcaaaagaaaaccctagaagataaatcggtaacaaagaaagacaaacaaagaagaaggagaagtacatcaatcctccatagccattcggtgccgaatatgtttagacgcttagtatgcaagtaagcatggtatgcggatttggtattctgattgattaggtcaacataatacgctgctgatttagcattctcgttggttggctcgacatattcttcaatttggttatgatttatttggatttgatcagcagtgatgattggctgacgatagagatagcgagcctttgaagctcccacaaaaagcaggacgaggaaggcgatgatgaagaagaaactgagttttcccaatcgagtggacatttttggcgtcttattggataaggttaattagggcttcattaatatatagattttttttttctttttagaaatatattagattttgtattgaagatcttgtaagattttaaaacggaatatgcaaagtcatagaagtcatggtttgtgtggtactaatcttttaacaacaacaacaaaattatgactaattactatattgttaaaataaaaatatatgacaatttttggcaatagatagtcttctttacaattttgaaaactatacatatatatcaccttttttcttattagtgttttttggtatgaaatatatcacaaaattttgggttgaaattgttgtattcagaatatagagccaaagtagtgcactgcttattacacatggcttggacaagtgatctaaaacggaaaactcatagggaattcggccgcattgtttcaaagaaattatgtagcacgaatcataagtaagggaagcttggaccaatatgtgaattgaataatccaaaagacaataacaaaaaaatctagagtgttaaacatattttgaatacatagcagaacatattattgcaatacaaaagaaaaagactaaatgataacatgtaaacaataaagaacaaataggcatcaaaaggacatcaatccttcatagccgttcggtgccgtatttgtttagaagcgtagcaagcaagtaaccaaaatatgctgatttgtcatcctcgttgagtgggtcatattcctcaatttggtcattgttaatttggccaaagattgtgagcctcaacgaagcaagacaaggaagaagctgatttttcccaatcgaaagattgttggagcaacattgatttaaataatccaaaaaaaaaacaagaaaagttacaatctcgatcgtcttagacataatttgaaaacctagcagaacatctgcttgcgatgcaaaagaaagctctaaaaaataaatggctatgtaaaaaagataaacctaaaagaaacaaaaggaaatcaatcctccatagccaatcggtgccgtatatgtttagacgcttggtatgcaagtaaccatagtatgcggatttggccttctctttgactaggtcaccaaagtatgacgattttgcattcttgttgatagggccatcatagaatggcgatctgggatcctcgatgccttcaggtcgccatcgattcgtagcctctgaagctcccacaaaaagcaagatgaggaagacgatgaagaaaaatctgatttctccaaatcgagtggacattgctgcagataaggatttagtaaacgtcttctgagacagatatcatcatcacatgtgtgcgtgtttctatttataattcaatatttgtaatttccttttcctattaggaaaattgagattttcaatggagattaaatatgtatgagtaagtttagatttactatattgttaataaaaaaatatatcaagaagtttgttgcaattgatagactcttctttaatggtcaaaaccaaagaacatatatatgtgcaaagaaactctataaacctgtataacttttgtttgttcaacattctgaacacaaaacaacagtaaagtaacaatgagatatatagccaaaaaaaaaacagagtagagaagaataaaaccaacgtatccttccaaccaaatgaagcatattatgagataaaatatctcatacctccttaagcttctagacttgcagtgttacagcttcaaaggtgatattgattcatgtgggtgggggagtcgaacattggtcaaagaatactgtgtatatgaagaaaaatctgattttaatcacaaattccaagtgactgatcttgtgtaatttgagaagagatccaacagtttatcgagtgtatccgggtgaaatttccttccaaacaagtaacacggtctttggattccgttccacatacaaggcatccatatttcttcaccctgttgttagccaaaaagaaaggtgttgttttatataaaatcctgaaaatagatcagagctaagaaatggtttcgaaagcgcgtaccatcccaacacttgtgacatgtacgagtgtgtcagtagactgcagatagataaattggtttagttttcttagttgaagcaatggaagaaactgatgcaaaaagatggtttagtgtttggtctataccgtgaggttgtttagtaactcgtgtgtgatatcctcaggcatatatgttttgggatgccactttctctcagaccaatcaacttgtgttacagtccagttagcaatgccaccgggatcaagcatctgcaaccaaaaatatataacatgaagataaaaaatgcagagagttttatagtctttttgagttgaaaatggtttattacatgaaagaatgttggcagatagtgttcatcagctatgcagttcttgttgttctctatacctggctgaagaaacaaaatgcaggctttcttattaatgaatacgatttatttcaatagatgttatcagggattttgctgatactcaccccgcagtaatctcggaatttagagtagtaaagactgtctgccatagttgctacagcgtgttgtcgcttcatggtgaaccactgcatgaaggagtaatttgggttcaaatgtatatttcacttcctaaaatggcagactagtacctaaaggatctacttgagacttctgccatgtaaatagataccaacactgaaacagagccaattttcctaagtgagcgtagttactagatcaatgaaaattgtttacctgtgcaccctttcgaaaatccttctttgggatttcaggcaacatgtgattcatatgcctgcctgctccatgttgacctggatcgtcaaagctgaagagtccaaagtaaatcaatttgtaagagttaaagaagttgggaagaagagtgaaaaggtgaatttgttattctgatgaaacatgattattaccagtcaacatagctgagattgctgtgcatcaggtaattgtaaatgtattcaaaacttcgaagtggtacacaactacaaaaccagaaacgctcacaagttttaggcaaagtcagagagatcaatgagaaaagcaagaaatcaagaaaatcacctatcagagagtaaaacaaattgctggttagaagtgtctctaagagcattagctaacaaccgtctctctgcgtcaaccattgatatccttccccacaccacctgcagatgaaaattaatacacatttttctttcatgtaaatggatggtaaaacacaataagatcttcaaaaattggcatcagggaaggagacaaacctcatcactacgaatttcgcggttgagaaagtaacgactgtagtgaactggcctttcctttgatgcatgtatataaacagagaatttcccttcatggccctgttgaggagtgacaaaattctgaaaacatcagccgaggaatgaagttcaagaacaaactttcaagttctataaggaaaactgacacaatgtctgaagaataaagcagttggttaccaggaaaaatctgtcccaaagcctctcaaaaggcaatgtaccaggagttaaaaacatgaaagcaattttagagttctttctaataacaggaggtgaactcaatatttctctaatgactacacgagctgcaatctcatcatctgaatattccctcagagaaggtggaagccaatcagctaaagccttgcatcctcttgatgaaatcatataacaagcacgtttactatgatgaggatacatgtaagccataataaagaacatggtgatcagtgaaagcaccatgatgatccatactcgtcttcttcctggaggaggagcacggtatcgagctccaggcaaagacacgggaatgtccgctaagttccctatactccatcttttaactgccttcatctcatcaaatcctttattgcttcagagccacaacaacacctcaataatagcctaatctagatgaacaaagctaacttcctctggtcaatcaaaacctggagaagttacaaaaatagaaacaagaatgaatattgaatacaccaacaaagaaagattcaattctagataagttccttcaagattagtccaacaactaaattctagctatccacgaaacagaggaaaagtcaaaccagctccttaagccaatgaaagaaacgttacactgtttccacgcaataattagagtcaacgatttcaacgaatgcttcacgagagaaatgctttgaaggaatctaaaccattttctcggaaaatcatcagatttcccagaaaaaaacatcagaggaaaacgaaatcgacactgttatatatcaatttcgattcaaagttacaataccggaaacacattccgatctcttcctaactaatcgcatcgcccaaacgaagcaatacgagagaatcgaaatcaaaatgaatcaacgagaaacaatgtgaaagaatttagaacctcaaatttacaacggaaccagatccaagcacaacgcaagagagtctcccaagtccgaatcgtcgtttcgctagattttctatatcttcgtcgttttcgctccggtcaaagatctcgagaaaattcaaactcttaagagctatagctacacaaaataaacgtatgtctctatgtgcatgtaaaagtaaaacgtctctttggcagttttaaaacgtcctcacacggattcgtttttgaatttctctctgatctctgtgttctcccttttatttctctctcgctatgaaattgaagaaatacttgtgaaagagctacagagaaattgatgacgatgatgaatgttgaagaagaagacgacgaagatgcccaattgggttcgaaacagaggaagcaaatttttgaggcagagattgataaaaaaatatacattggcggaaaaatatatgcattattattgaaaccttatgatatgacgtgtctttgtccaaaataaaataaaaagaaatgacgtgtaatgtttctagtggtcagattagcgcgtgtttttcacataagtttggacgatagtggtttaattacaaggttaagtaaattaacaacggttttaaaataatcagtacattaaaatctgagtaataatgtatttatgggagtaataattaaaagttatgctataaaactttagattaaaatctgcatctaccagtagcacgtttataaaactagctcatcccatgcaatgtcctggcctaccttggatttatttggttggatatatattaataatatatggtcctttgaatctgaaaccaggtcttaaaagacagttttatcctttgttactcaaagtttaaccaagtcatcaagtccgttggccaatttggtcccgtccaggaagtagccgtatgattgctttatttgatctgtaaatataaataaacatattacatttcctagaattcttatatatttcaaatacattttaaaagattggatcagcaccatatacatatatacacacacaacatttgaaaaaagtttaaaatggaaagaatgtaaaaaaaaactattgaaatgagcaaaaaaaaaatgctatttggtcctatcgatcgaaattaattatccacttttagctcatacagatagatccttttagctgatatatgtatcatacatatatattgacaattcaaaatgcatacaagacttgttggtttgaaaattagttccgagttttgcataagggagaccaagttgattaccctaatgtatatacttatataatttctagtagacataattcttccacttggatcatcatgtgtgttattttaatgtcaatagtttggaggaaccttcttcgccagaccgagtcaagatagtaaactctagttttctctatattatatagaaagttgtatgaacattgagcaacttgacataaacctcatgtgatcttagccagaaatgcacgatgtccacatcattattctattttcaaacaaatgatcaacgttgtctgataccatgcatttgcatgcacctcaatttacccctaattaactatatttcccttcttgctaataattgagttttcagttgctagaagcctagaagtctagaacaatctttcgatttagttactagctagttagaaccattaaaaaaattgtatgtatgttgtcactgatagttttaccttaatttctcttggttaaaagtaaaattgttcgttgatatatatttaccaaaaaacggtcgtgttctatatcgaacaccacgtactctccttccatggatgaggaaaccaaactgtcccaagaagaaattaaaagagagcttccttcttaaaacatggtaaaaaagatgatttacatgtgtcatcaagttttacatgtctaattaaataacgtttgaccataacatgtttccaatatgggcagtcaaataatatttgtgataaaagtacagtcaaataataaaaaaaagaaaaccttatcccaaaagtataaatcatatacgtaactatggttttcagtatgacagtcaatagtattttttttataaaatgatagtcaaataatttttgttcaaacatatataatgatagatgactgtatttctatgatttggtcgtcccataaatctataaatctactttggttgtccccaagtttttcaagtctatcaacaatattcaatttactagaaatttattttaacaaaagagaaatggccaagacagcttcttcacttgttctccccatcatcttccttgtaatgtttgcattaggtatacatttattgtaacgtttgtttgtaaatatatattcaaaaatgtatttatttctcgcacgtagtaataactttttgatataaaatggtttgttggatatagttgagcagaatatgggatgcatggcagttcttggctcgtgtggtgtgattaccgactgtagtggggaatgcatttctagatttggaccacaagcacgtggctactgtgaccgagatggtggttctggaacatgtgtttgcgtttatccttgtccggctgataagccacatatgtgatatatacatgcagtagtgtaaaatcagaacttctacaaaatgtataattaataacgcaatattaatgtcaaaaccatgatcgagttttagtaatatttttagaactatatcttggatcaagactttaatctcaagaaacaaatagaacacaattttcttatatgcatgttggttaggattgcgtttttatgtgtgttaatatcaactatcatcttttcatgtctgttatttttttttcattttttttttcatccttttcatgtgtgttatctatcatctcttcataaatttataaattaaacatatttagttttaaaacattaaaaggaatgtctatattttataaaatagtacatgtttgaatgatatatatttaactcagttatacaatgttttctcacatatacatatatatttcttaaattttgaagtaaaacaacatcgacttcatggaaaagactggaaactggcaacaaacaaatttacaagatattttttttttttaacatcataataggtcgacaagatcctacccctataccaatctatattttgtgagtcaacgcaacttaactataatcaaactaattaagtggaaaagattgcagatcatgaaccattaaccacttgactaaaaccatatttcccaaattacaaaatagatatctttacaacatttatcttagttagtattttacgttagcgaccaacaataaccaattcttcaactataaatgatcaacagtaattatctttagtagctcagttttagaactatgatcaaagtattctggaatcgaacataatctacgaatactaatacctttcaactccttcatattcatattgagaagaacattgaatattttggtaaaagattacaaatacgaacctcagtttcaagtattgcaagtttctgaatatgttttttttataatttgtgatttttagtattctaataattcccatgcttctacttttgctcttccttttttttatattcattttaatatcatatattatgtttatacataatgaaaatctatctccattttataaactaaaaaattatcattttcatatttaaaagttaatgttattaatgattgaaaaaattattacttttaactcagttttagaaattttaaaatatataagttttcttttaaaaaacagatatggttctatatataaatattttataagttctttttagtggtctcttaatgttttagatttatcagctaaaatcactttattattaatcagttttaggagaagaaataaaatactagcaattggggagaagaaataaaaagttttggtgaaacaaataatagaaatgattgtattctaaacttggttacttcacattgctataaatcttctttcattagtcttcttattcttcaggtcggtcaactaaaaatatggccaaggcaccttctccacttgttttccccatcatcttccttattatctttgctttaggtatttacttaccttaagtttttacatatacactttttcaccaaaatttaacgttaatttttgtagtattcattgtgactttagctttggatatacatttacatttataattgtgactttttgtcgatctctatatatatatatatataatttttttgttggatgtagttgagccaaatatggggtgcattcaaattattggcagatgcattaagattccagactgcagtgcgtcatgtaggaaattccttgggccacatgcaagtggctactgtgacaacgatggtgctggtggaacatgtatttgtacttacccctgtcagactaaggaaatacatatgtgatttctgaagtactttgaaatatcaaattctccaaattatacaagtaaaagtcaaaattcaaataatgtcaagatcgtaggtattacctttttttttgtaatattattaaaagacatattttgcaatcgaacatttgatatcaataaacctgatgagaaaatgatatttataattggatataagaactgtgaactgcgccgttacaacatatttaacttctcttaatattttttttttttaaaaccaaacatgtttaactttaaaacttttttaaggaaatgtttatttttcttttcctttttcaatatatatgaaatatatgtttagatgatacaataagttacaactaatcaactttgtagtatgttctttaaaataatagaaccgaatagatgtccgaatatactaaagccgtgaaaccagagaaaatcattgcattaacatataaactacctttaaactatatatctttcaaccattattaatagtattatatatatgttcaatctatccattattatttagtatatagttcagttataaaattaagaagtgaccaatctttcttatctccttaattagttttcagatttgtcaactatgatcaaacgttttcgaacctgagtacacgaatccatatataatattacctttcaaatctttaatattcatataaagaatattttcaatatttctcacataaagcataacatttcatctgaccaaaataaaatgaaatcataacagccgtttgactgtgaatcatattttctatggaagtaactttattggccatactattttttgcaataaattggtgtgtttgaaaagatcataattttatgatatcttcctatttatagatggaaaattaatgttcctttgaccaaaaactaatgtttattttgaccaaaaaaaatctaatgtttctttttaaagtttttaaaaaatctctttaagttgaagtctacacgttgcatttaaatagagcaacgatgtcccaataacatacaaacaagcattttagagagacaaaacttaagtaaaaaaaaaaaactaattgagaaaatatggagaccgtgacatcacttgtcttcattgttaacttacttatcatttttacatcaggtattatattttctactatatctttcaactgttatgttaaaaaaaataaaaatcatttaacacattccttgcagttctaaatgttcttaagtataattctatgatcaggataaacaaattttggcatggccacttgagcttatcatcttgagtatagggattcgatcgtttattccgtgaatgaaataaagtatcccatgggattttggattaaaaacaaagatattagtatgattgtgatatgatattttttctagtgatcaattttttcaataataacatatttaagaattaatatgtctaaaccataacaaaaatataaaaaataaaccaaaatatttatttgtgttaattttatgatacatgcaatgttacagttgtgaatcaggctagaggagatacatgtatagatggattaggctattgcaacaattgtgacgagagatgcaaggccaagcacggaccatcgagcgaaagcagctgtgatcgtagtgttggggtgccgctgtgcaaatgctactacgaatgtgaatctccgccatcaccacccgcgccgccgaagaaatgcgacggtggggctggtatatgtagtcaaagatgtcaaggacaatgttgtgatatgaactgtgcacaaaagtatattggtggacatggattttgtaatactcttggtacgtttagtttctgccaatgcgaatatccttgttaaagtcggttgacaaaactgtacaccaattattttttattattattttaatttcagcaatgcaataataaattaagaacaattactattaataataatatgtggacgacgtacttacaaacgttgatttttacgtttctataagacttttctcttgactacaagaatatttgtaaagattatgttcaaacatgcatttttttacttattaatataccaaaccaacaaattctgatttgttatgcttataattaaaatgaattttttttgttaagggtttttataattaaaatgaaatgtatatatttagcaaaaaaattcagtgtaaagtatttatcaaaaacttttcacctaaacgtagatatttagattgattacatataatactaataaatattggccaaataagtacttatcgatgatgagattgcactctatatcatttttattagtatcatacatctatatgatttatttctcgcttaccataatactacaaattcacatttttgtcgtataatgtatgtttgtgttattataagatccttattcgtatattgctctacttatgttgtaatctatatatgaatattgtttcttttgttggatacagttgaaaaaattatgagatgccttacattcattgggatgtgcaagacggacgtaaacgactgactgctcttcatcgtgtaaatgtttgggccaatcgctggtggttcatgcgacaaagggaatgatgttggacaatttggacagtgtatttgcacttacccttgtccggctgataaaactcatgcaatcaaaagttcaatttctcataatatataagcggaggttaaaattcgtatattttcaaagtattagatgatttgtttgtgtaaacaacattaacttatgtccattgttctacatatgaataaaaatataatatttttggttcaccacttttgcgtttaaaattaaacagactattaagatcacaaaaagactattttgtctacaatcaaaaatattttatttgatgacttcaaaataggtagtgccatagacaattacacttacatactttttttaccctacttaagggatgctatgtagaactttgagttacataaatatgtagatcaagtgtgcgtttcaatctagtctaaacagaactattaagatcacaaattttgatttttttctatctgtatttttttttaaatgtcttacaaatatattgttgattaaaagaaaaacattttatctcagtggagtggtgatcaataatacaagtacaatttatcgttcattttagagctttttaaaaatattcataagctcgtgttaaacactagatctagcaaatacaaattaatatttgcttgatttttcaacaacacaaaatataaataatgaacatgcattgcaacttttgattaataatcagaatttatttattagtagttttaccacatccgaatcgaaacatgaaagaaaaatacaaaatttattgatttttgcttattctagaaacatttaaaaagttttagcaattatattggcatttacacaaagaagtattgccaatgctgtcacaaaatccacttccttgattatacttttgcgcacagttttggttgcaacactgagccccacatctatcgctgcaaatgccagctccaccataacattttttgggctgcggaggcgatggaccctgtccgcaagggtaattgcacgtgcatagttgaaatttggagtcacaagcgcctttggccgctggtccgtgtctggccttgcatctcacgtcacattgctgacaattaccaataccctcgatgcatgtatttgcgtttaccttattctcaactgtaaaagagtatacattatttgttttttttgtttttttcttagtatataaggaaattaaaccattggtggaatctactacaagtaacggaaacgatcatataattgtgaaaattttgagctttgtcaaaaatgaagtataatgatcgtggttttcttaaatgagattacaaatatgtgccactgtgctaggcaaccatgttgaggttcatcttttgtaagaaaaatttatgatactaaaactgtaaaatttaatgaaaataaaataatttttcttaatgttttcagagtacgatttacggcctcactaattggaaaaaaagatagaaataataccggaagcaagcatgatagagaagatgatgaaaaccacaagtgaaagtgccttctccatattttctaagtttttcttttttctttctgaaaattggttgagacaattaatgatatttcaatgaaacatttaaaggggtgtattggacttcatattttagaagtattagtgaaatttaggatattttagattgggggagatttgagtgaacttcaagatatttggttgatttattagtttttttgtttaatacattatggattaggtgagatttattagtaatttgggatttttcatgtttaacatattgtttttcaaaaaatattcccctccagaagtgggattttttttcatctctatttacaactaaaaaggtatccaaagactcccaaaatcagtttcaatatttgtttcccaaagaattgttgttttttgaataacaagagatttggtaatatttttaattattttaagcaaattctaaattcagtaacataagattttgaaagacatttttgttttgttttacagcttgaaaattcttatttgaataacagattatttaagaaaaaaaatcaaaatcctccaaattactaggtccaatacacctccctcaaggtttagaacattagaattcaaacttctaactaatatttcattggaacattaagttggtctatatataatgtactaatgccccaaaatattctggatctctagtggcattccacatttccaaggcacaaatatcttactgggctatttatgttcgagttagataaaactttatgggcttcatatgttcgatccgtttcgtattaaaacccaattttgaaattagataatagttttgcataattccaaattatgtagccaactatattaaatatcttgagaatactcgatcaacacttgttccgattgtttactaaaacattcaccgatcgaatctgctgtcatgttttagtcaaagaacacaaaatgtttttctattgtacttgcgtaaatttagcactatgaaatttattcacgcggtggttgtaaatctcgagattggtattatattttgggtatagaaaaaaaaagagagagctcgattgtgtaaaaaaaaaatgaaagtatggacacgtggaaaaagaacgtgaaaggaaagacaatgacagatttaagtgtaattgtgaatatgaagaggacacatgcattgatgtttcttcacgtaaagaaaggccttcgagttggcatttccttgcctcacgaatctttgtctacctcgtgcctctttttaattctcttgtcctcttttttttactttttaaatctattatttaagaaaaattatttgtttattttacataaaaaatagtattcaaagtgccacaacgttcgctactctgtcgcttctcctctttgacttttgtcacacttgtttctgtcgatatcgtcttaactcaagtactcaaccatggttaacaatagttttgttgcaaaaccctaagtattttgtcctaataattaacatatatattatgatcgccagttgattaacttgactactttgattaattaaatgattaatccaaatcaagactaccccatgtatctctcattttgctgtttgttttctcttatgatcttgttgggattgtgaattctgaacatgtgtggttcaagagtcaacttcatacgtagagttgtcacaatcacttttgattaatgtaaactcctaaacttttgatttattcagatatgcaattaatttatgtgtgtatctatttttgtatacaatgttcatactctctcttaagctacaataattgagttttggttcaatttatattaactctaatcatgacatgtaactggatttaaaatatctccctttcgtctatttacacatttcatgatgtccatcactctcaagtcatattcatttttgtattgatgtctagaagcgtcgtcagattaggtctgagagtggacaagtcattttacaaaaacatttttacaaatctatcatgattaagacttgagattggaacattataggacattaggttggaacagaaaaagtgagtatggttttatataagattaaagactagaaagtaaaaagggctagaacttttggtctttttacattaaataagcagagaaaaagtgagtttagaacttcattgactttgagaaccgagaagcgaatatagagtactttcgttgtacatttataattagtaggttgaagatgatatggaattttcgttgtgtatacattggaatctgaaaatcttttaaatatatatatagttttgagttataaatgaaaagtgggagatccaacttaacttaggtgttgaggactttgtgttttgtcaaacataggatccgaccgttgtttgttgtgcatgtgcctagagacatgaccctcgcatcaccctaactaattgtcttccagatttttattacttttcatacctctcaacaacttattgatcccaagaaacaaataatgaaatatttaaagaaaaatcactttatatattacataatgaatcaaagtaagcaatgcaaccatgtttgaggcctattggtttatgcgtgtcatcactaatttgtagacaaattgaagtgactttgacaaacatatcataatttgccgtctagactttggttcttataccctatttgatcaatgaagcttttcaagggaagaagaacctattttatttgcaaatagattgtgaattgcattttgaaacttacataatccaaaaaagtggaactaaaataaacaaataaaagaaaaaaaaaacttaaaagattcaatcgttgagttttgacttccaagctccaacaaaacactctgccaagttatactacaacgctctcacttccttgttccgtcagaattgtcaatcttcgagctgtcttcaagaactcactgccaaagatgagtcaaaacaccaacaactattagatgttttcttttacttcatcatcaaaatagtacgaaaaatatgacaatcttgtctataataaaaaaatgtacctgaaaggttcgtttcctgcgtatttgatggctcctgatgcatccctatagagaacagagcttaacatctcagactttttgattccaaacatgtcagagagtttccgactcaattcttcgtatgaaccaagaaccgataggtctaaggttcgacctacatcgtctgactccataaacactttacaatgccctgtttccaaacctgatgcatcatgaactttcttagagcaaggtgatccttcatctgacgaagaaaactcccttcccgcaacgccgttttggttcgacccgcctgatgaaatctgcgttttctctatgtttgcggtatccgttgagcctttttctgatagctgttcctcgggtagtataagcttgccgaacaatacaatatgggactttttagatttggtatcattgcatggtgttgttcccattgtcaaaaagcaaaatcctttttcgtttttggtatcgatgtttcggagaccgagagaaggagaaagttggagagaggatggaggaggaggaggaggtggtctattcaagtagtaatggtgaagatccgaagatgataacccgtagtactgatgagcattatgcctggctccctgtaaacccacgggaacattgtccagaacagagcttaacgggcttgatctaataaggggattgcttgggaatgaaggtactggaatcgaattgatcagattgttgtaatctggatgctgaggtagccgcatctttttcctcggtggcgaaaacgaagtaagcgggatcggatgtacgtttgataccaattccaccaaccacgggttaactcgcttcacgttttggagtaaatctggctcatcccacgccacctgaaaacacaaaaatgcaacctatgagtctatattctaacttgagctagaagaaaattttgagtgtttgtttacctgtagaagccgccaaggagagttaggccaacggataggatcagagacattaacagctgaaacagtccccataaaccaacttatccgagacgaatcctctgtctcaaaagccatcttaaacctcatacctgagcaccacggaatccgcatggcagctcgagcatctaatgccttgacacaaaactctgaagtgctagctctcggatagtacacaacctcaaacggtcttccgctaatagcaagagtggctgcttctataacagattcagccgtcactttccccttcctatccgcaagggaacaattacttctcctcaaactattgctttcatcttcccttaacagagaagagtagccgcaacttccaccgatcggattccaacccgctgaatattcgggtccattacctatccctcctctcttagccctcctaatacctacacaaagatctccattctccgctctcatgaagacaatcgaatctcccgccacaagcttcttctggtttacaaaattactccatccggttgtaagaaggtgacgccgaggcgtccctctataaatatgtctgaacttccaaacatcaccatgaacatccttagcaagaatggtctgaaccggcggctcggcgttataatccaacctcgggaaaatcgtctcagcgcaataacgaggaacagagaaacccccaccgttattagcatcagactgagtcaaagtcttagcaaacgaaggcgttttctcactattactctcgaaaccgttactatcttcaccatcaccatactcgtgatcaacatactcatcatctttcaaaggaatcaatctcagtttagcgaaaacctcgtcagattcagcatcagccatatacttaatggctaaaacacgacacaaaaccatgggaggaatagggagattaccgaaatcgacacaatcgtaagcgttttcggcgtgaccttgaggaaagtaaaagactttagagttcataggaggcatacgaaccataccaccagcacatgcatgccatagctgaggatctaaacctttctctgttccacctttcattggattcatcacatttatcatattttttgtgaccgtttttgctgcaacaacaaatacaaatgtatcagcttttgtttgagaacagagtaaccaaacaaaagcacaatacaaatgctttttatttagcaactcaagtcctttgtatcagtcaactttacctaacaaacgaaattttcccggaaaataaaaataaataaaaagattcaagaaaaaccgacaaaaagggtcatttcagatagtaagaagatttcaaataccaaatctccggagaaaacaaaaaatacaaattataaaacttcaagaacgttttgaggatatttagtttattaatccattatgaaattaaaaagaccacaaattaagaaaatttagttagattagattttcataagagcaagctcacgattgtgttgtgtgaagcagacaaagcaaaaaaaacatagatcggtctgaagtaagaacaagaaccacacaaaagaacagtaaactaacaaagttagatagaactagttagacatgatgatcaaatcgaatcaagctaaaccaaatcaaattcatatcgaatcgattgagaaaaccaaagatgaaacagagaaagattaggagagaaaatttatgtaaaattagttcaaacctgaaacagtggcagatctgaacaaaatagcgaagattctgtgaaaaaccaatctaggtatagagagaatctgaagattctgcagctaatttctgcttcagaatcggataaggaaggttacactttttgcacaaagaaaatggaaaaaggggttcgtatatatgaaggaaagagctttggctcttctgcagaaaaacaaaactaaaaataaaataaaaataatattatctcttttttctcaactttcattaactctttcacatgtcttttttattattatttcttctctagttagtgaattttttagaaaatattaatccggattattttaagtgtaataaattttaagcctaaaagaaggtaacaatttggtaagtcaaacccttgattccgggcataaaaatcgacaatatggagtgtgaaaaaagaagagaattaaaaaaagaaatatcgacatacgagttaaagagttgaatcgcgcacgtgacggatccgcacgtgtcgtcggtgcttccgacatatctccttgaaatctgattagaagcatctaattatttaacaattcaaggcaagctaattaactcagccattaattgttctttgaataaactaatttttacagtttgatttgataatcccaatagttcattgaattatttttaacttattgtttacgaaacacgatattttgttgataaccatgtaagcaatttgctgttgctaaccatctttctttgtgtttaaacgatgtaaaaataaaattctacctcgggtttttatattcccgtttgattggcccagactagtattctaaaatacattatacagctgtatatatatatatatattgtgttgtaaataactatagttctattttatgttctatttgtatagtataattatatgaaatacacaactgcatatagacgtataaaggctgtacatgcagcatatatatgaggtacacatatttttaaaaacaaaaaacatagtttcgtgtgtttttctaaatggtaagtgaaaggaagattaaaattattggtttcaaaaaggaatgaagggagataaacatctaactatttatgttaaaatttaccaaagttgaaaaaaaaacttagaattttttgcttttgatcccatagttttttcgtaggttgcgaaccaattcataggaaatcaggagacttagataatccttttaaaatataatttaaggatcctaagaaaacattttagaaaatttctctgatatgactataccctatatatccaaataagatagagatacgacatacatatgtcaatcctacatgatcgtagcaaggctcaataaatttccgcatgtgtcattgtatttttttgtcgtaagagttagctttccaattaataataccaagagtttgatctaggccatacgtaaacaaaaatccaatatccaattatatacacaagtataagaaccaaaattttcaagattggaattatgaaactgaaattataatctgaaattattttagataacactaaaatcttttaatatatgggaatgtgataataagaaaataataattaacaatgataatgaaaacatatttaaccggaggacatatcacgtgtgagtaaccatggttaagtttgaagtgtgtctgtgtatgtgtgttgtttggtcaataccacatactttccttgtcaatagttattacgtgtgtctccatttatgttaatccagtaataatttacatgtcacaagggcaaattcggtatttgaatcttaaaccaccggatctgatctaattgtcctcttattattccttcagattttggttaccacatttgcatgtaatactccttagtggttacaccttctatgtttatcgatgttcctcatgaccacaagtgtcgttaataatgtaatttagatttgggctaacttttggaaaaacttgggcatgtgaactcaatctactaataatcatgttatatttttaggggttggcaaaccacaatttgggattttgcgagaactggacgaaacaaatttcttaaaaagaaaaaattatttatagacagcaacgagacatgacggaaatggaaatgctcgccaatatttcttgcttgttttatttttcaatttatacattttagtttgtttgttccattcaattatttgggtttatggtttttattttattcacatataatggatttgataaaaaatttgaaaaatagtttggacaaaagaaaaaaaacagaatgataaaataaaagctaaaaagagaaatgaaagctaaaaacaagaaagagcgtaaatgaaaagcgacctataaaggagaagacatataaagacatgaaattgggatcagacacaaacagtcgttatagacattgactctctcttgtccttttctttctcccattttgtcttcacaaaatagtttttttttcctcttttaaaatatagataaagatattttaatctgaagttgtatgtttgtccgaaaaaaaaaatctgaaatattaaggctttttagtttcaacttgtacccaacacaattgggctgggcctggttacattaacatggcaaactaaaatttcccaatcacatctgtatcaatgtgagaagatttacaactcttttcttttcttctcttctctactttataaaaaaccataaactatgaaaactgaaaaagattgttctaagattttgtcactacagagagtcaagagagacctatagttttgtagaacacctctgcttcaacttcttcagccaatagatatttaactattataagtctcagaaaccagaaaggtatatacaaaccacctgcaaaagatatttcctccatttaagtaaccatcttttaataggaaccaaaacgaatgatatatatatcgattaagtgaagtcacaaaaacctttttgatctcttcaagttatagtcctattgtatcattggtgaggatgtcggcgtttggctctgcggtacccggtggttggttcttttttatggttgtgtctcttcttccccttaggactgttagatgcaattctgtaagtactttctgatgcaacagattgaaacttataagtaaagtttagactattgttgaatgatgttcaaagcttacttggagactgcagaaagcaatttgatgatgaatataagagggaatccaattaaagctgtggcctgttgaaaatttaatagaagaagtgagtgagttcggatttgtagactctatagatggatagaatgaccagatgttgttgaaatcacataccccaacccaagctaagtccatggtagcaaccggtttggtgatctcattgttcttcagcatttcttgagccttggtttcaacagagtgaagcttatgaaagtgttactctaagttgacttcgtaaaaacaaggacacaatatgatgaatatacctgttgatggtagattttggttgagttaaccaacttctgaaagccatgtcttacgttttcagtatatggctctaaggcaacttgtactctctccaagtgtggcttcgttaaggtcataatccgggtcgtgtacggatgtgtatgtgttctgatcacctaatataaacaaaacaatgatcacaatgttttatgcaatgttgaagagaagcagatggaaatatattaacctcaagatagtagtatgaagcgtcaaatccttggatgagatgtggtgtcaaagcctgcttagatgtatataacaactcgatggacttatcggttatatattgaacttttggttcgagatatatggttattgtgacacatgcatctttgatgcttggaatccattgctgaaaataaagatcagatatcagtatcaagaaaatggaaaagtaaacaagtgtgcagttagaacaaaactcactgagttcagtgtttcaatgtgaggctctgaccatttctggacttgctcaattttcatcgacacctgttgaagaaaggatttgtctttaaagaagaaattgaagactttcagggtaaattgtgaattgaagacaaaccatttgaagagtggtatgaagagttgggctaagatgttgatgccatagggtcatcagatatgcctgcaaacatgaaaagaaagggacttgagttatcactagattatgcgatgttacacgccttaaaccttttagaattacctgactttcagtcgggttaagaccaagtttagacaagaaccacccatcgatctgaacacaggaaaaaaaaaaaagttacagtgaactctacaatatgtacatcaaatcctagaagtaccatatctcttacattttcaagctttgagctaagttgtgcaactttcttatctgctaattcagcttccacttcgagccttctcttgcgttgcgtttccacttcccgttttaatccaaatacctgtcaatgcacaagtgtcatagaaagactgaataaacgtaatgaggcaaaaggaaccacacaattcaaactacaaaaccaaacctgtttctgtagttcataaaccttctcttctacttcactcgcatgctttaccggattctcaaactatagagcattaacggtgacaacagttaataaccaattcaatctttcttctacatatttttaacaaatgaccagaagatggatgaaaatctcacttgagaaaaatcaatttcactctcaaacaaataaggtttctccctgatatataactccaaacctcggattttctcttccttgctaagcaattcttggtttttctccttgatgattgattctttaaacaacacacaaagaaacaaaaaaaaaagcctctcaatagttagcaaccaaatcaaagatgcagctattgtaaaaactaaaacgtcgtcagctttgaaaagtaacaaacgttacacaagtaatcttcccgaaacagaacgaaagctgaaaatgtgaaacgtctctcttttgcaaaaaggttaaaaacaagaaaaattcgatttcatatcaaaattcaatgaaccgttacactcatttctacagaattttccaaagcaatgcaggtatgcaacaaatatcaaaagacctcttctcatattcgctacagttcttcataaacaaaactgaagaaatacccagaaaacaaaattcagctaatcgtagagaaagttcaaaaaggctaaacctttacattgacattaacgctctaaatttgcagacttttgaaagaaaacctgggaagctaggcccaaatcgaaaagggtaagagtgttatgaaccgtacgaagagcagagacggtggatttgagttcgttaagcaaatggttttgatctccattgcagccattgttctctgaggaagaagaagaagcttctccatttccagtgaatgaagcaatttggagcgttacgagaaaaagaaacaaaagtagcttaaaaaacgccattattggagactgcaacagaggactttgcacagtacgagagaaagagagagagagcgcgagtcgcgagagagagacagagactaacgcgtaccaagtcaaataaagggtcttactatcttttctataattacatatttgtctctttacttttgataaattctataaacggcccaaataagtttgtatagattttgatgaaaaggtgtcaattgaaaaatatcttatgcaaaacgcctaatttaggcgtatccgaaaagtcctaattagccttaatctgactcttaaaatcttaatgcaactaaaacggaaggatataaacttataatgttaaaatatatgttttaatggtccattgtgtagtatttttccttttacttcacacgtttttgttaagaatttccttcttctttttgccatatatagttgcttgtaaaaaaacaaatcttgactttttcttaaactaattattttgctgtaaatatagatttttaataaataaatgatatttaaaataattgttttcaggcaaaactattatcaatgttagatttatcttattctttttaatcaacgtggctctctgtagttaatcaataattcactgtgtaattgtcaaactgtaaatagaccatttcaatataactaagaaagaaaactttatattttcattagtttccatgtatctcaactcatttagagaaaataatatttacatatttcttactataaaataccaaaatatatctttatattttaatttaaatatatcattttaatgaattttatcttataaattttaacaaatttttcaattgctgtaaagaaagatgacctttaattaactactcactagatagtagaggcggtaaaaaaaccgtaaacgtatatttaatttgttttagtaaaatttaattataaactgtttactaaaatgcaaagtaatcaataatataaacttttcctattttatgttattgtgtcacaatgtttatagctttaaatacgatttattgtactattatatttttaatatatggtaacttaccatattctctcattatactttattgtaccgctatctattatcgtatactcttatttttaaatccgtaagaaaatttgatcgacttagtatcaatttttttataataaaaaagctaaaatcatgtaacttctaatgttcatcaccaataaggcacatagtcttgctaaatacactattttagatttataccatctacattatatgtttctactgcaattctacggcttcaacaaccccattttcatcacttcttattaaaaccacaataatttacgcacgatttgattaaaaagctttaaaaaaaaaagctatatgacattacatgacctatgtagtactaatctattcgacacaaccaataaataatgcattttaattgccccaatccccaactttcttcttcgtgacaagagtagcccacatgattttatgaaagaaaaaaaagtgtagtctaatacaaatttagttacatacgaaatcagtcgaatttaattattgatatataatcatagaaacaaagcttatattctttaacccaatcacaagcatatgacacaggggacctagacagtaatagagtatccaaatcttaaacaattcaccagtcaatattaataatacaataaaactatataataagatagtaataaataagaaataaaaataaataaataaatgaaaaacctagtttttgacgcaataataatagaagcgaaccaaacttggcctcctcttcgcctataaatacgatatagagattagcgtcaaaagagtatgtaaatcgcaaaaacaaccaaacaaggtcttcttcacacactctcatcgtcgtcacttttttttttatataacatagtctcgttctagaccgtcggattatttctattggtcaaatccaacggtcgtgatccaatttgattagaaagagtctcatcgtctctcaaccaccagattctctcgctcgctcgctccctcgtcgtcgtcctctctacgatatcgaccaacataccagatcttcttcgatcccgcctccgtcgccgttgctttcgttattttactcagccgccgtttccaactgtttttaactttttctcgccggagattgagattgggattgagatttctttagggcatttagacgatccgattaattttagagacgaggttttatcgacccccaccgacaccgttagtggtttgttctctcaatctcgatcctttgattgttataataacctaccctccattgatctatcgtctctgattcattggttttgtttgttaattcgtctgattgctatttaaattttacttcttttaaacaattttaggttgcagcgatttaaagatcgttttttttttcgtaattgaatgtgattcgtatttgtttcaatcaaatttgcattacactgtctattgattgtggtttgtgttgggtttaaattatgtctgcagaagctggtgtcgtgagaggggataagtcttttgatttgtgttattgtgggattatacactgtttatgactatacatacgagatggcttcagaaggaaaattgttatttgatcttaatgaacttcctacagaagatgatgatggcattgataatgttaacttcaatcagcagccacaggtgactatcccatcttctaaccccagttcctctgccttgcttgctacaccgtcgtcttctcaagataatgtaaacaacaaccgagtgttctctcacgcgtcaacagtttctggttttcagccttttgttcgccctgtagctgctcaacatacggatgttgcagttgaaagaaaggtggacgagggttctcttgaggaagcaaaggttacatcattgaaagttccaaatgatgttggagcacctgagagagaagaaggggaatggacggagtcggaggttcctgccaatgataatgtacatagtagttctgattattctacagttacagagaaagataatggcactctaggattagatatcaactcagactcggctcttcagaagaaaaacgtcaatcatatttcagaaagtagtggtaaagatagtggatctatagatagtcctcaagaacagggtttaacggtgaggccgagagaaactaaaggagttgaagcaagtcatgcaatcaaatgcgcaaatactactgtcaaaagaaagatggatcatcagaaagagacaatgttgggaaagaaacgccacaggcagaccatgtttctcaacctggacgatgtcaggcaagctggtcctattaagacaacaacacctagaagacagaatttcccacaacctgtcgtcacacgcacagttagagaatctcgtgcaggccctccaactgctgagcaagcaggcggggttccagggcatgttgtataccgggatcagaaaccaattgacattcctaatggtggtatacatccagaaacatctgaacctaagttagaatctaatggtgaatcacaatccggctccgctggtaaaactaggaggatgaatggggaggcaggaccttctgctgaggcgacatcgacatctgtgtcaaggcagggttcatggaagcagccaataaattcacggcagctgaagagtggtcattcgtcaaatagacaagttcccttgtgcagtcaaacctctgccgactccaagtttggtaacaagaaatttacttcgttcaagaagcaagcaacaaatagtacccaataccaagatacgtctgtggagcgtcttctacgagaagtgaccaacgaaaagttctggcatcatccaggtatgtcctattagtgtttctgcttatggaacgtgtgtttgagtgctcctatgttttcaattaagttatcttcatttaaggtaggaacttttatgccaattataatctactgctctggtgccagttccatgtgtcccgaatcatggctcagtgagaatcgtaatggccacaggatttggaaggtgatacgattaaatcatacttgtaaaagtagatgacagagctcttctagtttgtgttaaaattttttatctacttgtcctgtttcatctctcagtgctctgtagtaaaaattgtgtagtagtagttctcattcctggtactttatctgcctgctaaggcactaaacacagggtaatagaataatccattgtcttagacatgcacttaatggttcattgtcgatgaacatcatttgttaggttggctcttggtggctttaatcagcttggttaaagaggcttttgtgcttatctgaaacctgaatggtctatagtgaaagtaaatattggacttggtaggggtttttattgacatgcctctggtctgttctgtacacttctcactggaaaatttgacttgtatggatgatgttgattcacttaaactttttcttatggccgttggtctcccaattatggttgtcttttctgccttatctcccatagtgtaattgactcttttgcataaatgtttcttttatatagaggatactgatctccagagtgttcctgagcggtttgaatcaatggatgagtatgttagagtgtttgaacctttacttttcgaggagtgtcgggcacaactttacagtacatgggaagaattggctgaggcaaactcatacatgaaggtcagaataaagttcatcgaaagaagagagagaggtaaacatccctattaccttaattcaaacttgtaaaagcctctgggcaacaatgttaactctctgctgactgttctcttgttacctgactgctagcctttgttttgatctggtataggatggtatgatgtgatacttaactcagtaaatgaatgtaaatgggctttcaaggagggagatgttgctgttctatcaaatcctgtgcctgaatcaggtgtggtggaacttgtagaatgtctggtcgattcgtatattgctggtgcttctctgtatattctgtaatgttgtcgtttttatgtttagaaggagagcatgatgatgttgggcgtgtagctggtacagttaggagatatataccggttgatactcgagatcctcatggagcaattctccatttctatgttggagatgcttatgactctggcaggtacatgctttttcatatgtttaattatttagctattaataccatgtctgagtttctacccattcttactggaagtaattatttcctgcctctcatttctttactttttaattttctttaccagcaagattgacgacaatcatattttaaggaagcttaaacccaaggaaatctggcatctgactgtgcttggttcgattgcaaccacacaaagggaatatgttgctttgcatgcgttttcccagcttaacccacaggttggttttgttttctccaacaaatatttcatatatgctttcagttatgctgacgctgttgaaactcatatatccttcagatgcaaaatgcaattctcaagcctagcccagagcagtttcctaattacggggagcagactcctacagtgcccgattgtttcactccgagctttgctggccatttacacagaagctttaatgctcctcagttggcagcaattcactgggccgcaatgcatactgcagctggtacgagcagtggggtaaagaggcaagatccatggccatttactcttgttcagggccctccaggaacaggcaagacacacacagtttggggaatgttgaatgttatccatttggttcagtatcagcagtattacacttccttgctgaagaaattagctcctgaaagttataaacaagttaatgagagcagttcagataatattgtgtcagggtctattgatgaagtcctacaaaacatggaccagaatctatttcgtacgctgccaaaactgtgtgctaaaccaaggatgctcgtttgtgctccttcaaatgctgcgaccgacgaacttctctcacgtgtccttgatcgtggttttattgatggggaaatgagggtttatcgccctgatgtagctcgagtaggtgttgatacccaaacgaaagctgctcaagcagtttctgtggagcgaagaagtgatctgctactagccaagtcccgtgaggaaattctaggacacatacacaaccttagagtacgagatgctcagctatctcaagatattgctggacttaaaagggaacttactgctgcagcgtttgctaaccgttctcagggatctgttggcgttgaccctgatgttcttatggttagagaccagacaagagatgcaatgttacagcgtctttctgctgttgttgaagccagagataaagatcttgttgaaatgtctcgccttcttattgttgagggaaagtttcgagctggtacttcttttaatcttgaagaagctcgcgcaagtcttgaggcaagttttgcaaatgaggctgaaattgtttttacaaccgtatcaagcagtggccgtaaactgttttctcgtcttactcatggcttcgatatggtggtcatcgacgaggctgcccaagcttctgaggttggagttcttcctccccttgcgcttggtgctgcgcgatgtgtacttgtcggtgatcctcagcagcttcctgctacagttattagcaaagctgctggaacccttttatacagtagaagtctctttgaaaggtttcagctagcaggttgtccaactttgttgttaactgttcaatataggatgcatcctcaaatacgcgacttcccttcaagatatttctaccaaggacgccttacggacagtgaaagtgtttccactgctcctgatgagatttactacaaagattctgtccttaagccttaccttttctttgatatcagccatggacgggaatcccatcgaggtggatcagtatcttatgagaacattgatgaagctcgcttctgtgttggggtgtacttacatctacagagaactctgaagtctttgggtgggggtaaagtctctgttggggtaattaccccatacaaactgcagttgaaatgcctgaaaattgagtttggaaatgctttgagccaagatgaactgcaagagatttatatcaatactgtagacgcgtttcagggtcaagaacgtgatgtcataatcatgtcatgtgtgcgtgcttctaatcacggggttggcttcgttgctgatatccggcggatgaatgttgctctcacccgtgcgaaaagggctttatgggtatgatgtctctcgatgcacatacatattgttttggttaaataggtctggtttcattgttaaagtttctatgtctcgtttttcttcaacaggtgatgggaaatgcatctgctctgatgaagtgcgaggattgggcagcattgatcactgacgccaaagcaaggaattgttttatggagatggagtctcttcccaaggatttcccggttccaaaggtacctagctttatcccaaaagcacctaatgctagaggtttcagatcaggtgggccaagaaccagatccatcgatatgcaccctgaatccaggtcagggacaccatcagaagacgacaagaagctgagcacaacaacatttccaagaaatggaaattctcgaagggagaactcagttgatgattctgacccgcccggggatagatatagagatgcttggcaacatgggatccaaaggaggcaaaattttggacggcctttagggagaagagattaatttataattccaactggtcctgaacatcatacactggtggagatactatgttacttgagatctcagagcatccgacctagctcatggtttcacagggtcaataccacgaaagggtgactcgaagtcatgaactgttgaaaagaggaatgcttgaaggctgtgtacgtcaaagggtaacatgctcacctgatttgtgctggcgaaagatgattcatgctatttctttcaaagaactggcgctcttctgctcccagatcgcagaccttcttgaagaagcatgtcaggttctttgtgattcatataaatctgaaacggatcagttggagactacactgtataatccaaggttgaatccacttgaatgaagtcagaagctgctaataagcctaagagcttgactcttttacaggaactatgaagcaactcctgcattgtcaaacactgttattcggtgcaaacaacaaaagaatgattagtcgacaggttcacagacgtaggaaatggcattcgaaggtagtgtatagcgaatggggttgggaagatttgtttagtctgcaaaatttcttaagaatatcaccataccacactggctagttcactgtgttagcgctttgtacataacaccatatctatagttatgaaacttggttctttttttccttcattcaatttgttgtcctattttgttaatcatatctgatcaatggagacatatattctttaacagccagttactcttaactgtttgtgcaaatatctctctagccgatgataacaggagaagattgaaagataagactacaaaaggatcattcacatttccttgatgaatcacatggtttctagatcaacatcatccttactgatgattgcaagaagaaaggttaggagtacaaaatataagtgagaagctaaagctattcaatcacaatctctttcaaggttccaacgccatgagcccttgtgtggtggtgatcgtgactgcaactctctttagcgtagctcctacaacagttgctgccatggtggcacctctctctgctgctacagttagacttgcaatggctatcgctcttcactttcaagctagttatcgcgagatcagcaggacttgaacaaaaaccattgaccaagactttcagttcctctttcgcatccccctccagattgaccaatgttgaagaaccttcgtgttttgggccagttccaatgtccaggccagatggcttgtcatgacagctttgttgcaactcgtgttggtgtggctgttgactcttgccaccacaacaccctgagtccaggccagatggcttgttatgacagctttgttgcacttgcacctcgtgttggtgtggttgttgactcttgtcaccacaacaccctgagtcatggccatgtcctaaatcaacaggttctgcacaacagctctttttcacaaccgttacattgtctttctgtttcgtctcacaacaaccagagtgactatggtccgaactggctttagctggtttcatcgctttctcttgagtcttcgttccacaacagcccggcttgcaatgcttatcactgatctttggtaataagcctgcttccatgtccccagcagcatcaccttcaagtttctccgcgattaaaaccgaggaagaagaagactccctataacatttgtttccagttttatgtttatcactgagcaacaacatgctattaaggatcacaagcagacaagttcctacatctgcaagaacagctgcccaaatcagcggatgaccagcaaatgccaatgcaagaatagctcctttcatagtgattgatatgaccacattctccaccactttccttttcgctctttttgcaagctttatcgcctgcggtattcttctgatatcattggacatcagaattatattaccagtctctgttgcaagtgcagagccggaaacacccattgagataccaatatccgctgtagctaaagctggtgcatcattcaacccgtcccctaccatagccgttggcccttcttctctctttaactgttttatgatttcagatttatcttctggaagaagctctgctctaacaatatccatagcatttcctagctgtgggttcatataacatttaagttttcattagtgtgatttactaagtttcaagagaagcatcacactcattaaaaaaaaaaaggattgctcacctgttcttgagcatgcattgcagcggcatgattatctccggtaagcattgcaatcttaattcccaacgatttcagttctttcatggcttgagctacaccagatctacaagcatctgagagattgaaaacaccagctagtgtttctccaacatatacatatccaattgtctttcctcctttagtatcaacatcaatatctggaactgtatacatgcaccaaagcaaagaaccatcagagactaaagaaagaccaaaaaccttaatgcataaattttgatatgtacctgataaacacccagctctagaagcaatccttttgttaccgatatagacttctttaccatcaatcttcccataaatcccttctcctggaaagttctggtagtcttcgaccgcttcaggcttaggttcaacagagacagatcttgcatagtccacaactgcagcagccattggatggcttgacttgctctcagtgcttgataccctgatacaagtcatatttctcaattctcagacaagtccacaaaaccacaagtgtctttagtaaagtattaaaaggttagaagagatgtttcaccagtaaagcagactctgcaggcttatatcttcagaaagtgactggaaatccatgacgatgaactcacctctagtgatagtcccggttttatcaaaagcaacaatcttgatcttggctaaggtttcaaggtaatcagctcctttgatcaaaagtcctgatgtggctgcctttgtgagtgcacagaaagtggctactggtgtggagaggataagtccacaaggacaagcacttactaacacaactagtgctaagtgaacccaatgtttcaggttgtgaaccttcaatgcaaatgggatagccacaaaacagattgatatcaggatgatcgctgcatacaagcaaaaagatttaaggtctcaatcaagaacaaaaaaagttgtaatgaagaaaaaaagtcaggtgctgatactaacctggagtatagtacttggaacatttatctataaatctctgagtttcggttttgctgttctgagcttcttctacaagttttgccatcttcgcaaccacgcaatcctcagctagagcagtggtgttcacagttatgtaaccttgaaaaacagaggagctggaaatatcaaacattgaaggtaaaggtcataagaaaaaagtgtaacgcttgagccttttttataccatttagattgatggttccagcccaaaccgtcgaatctttcagtttaggcacggggaatgcttcaccggtcaaagttttctcatcaacttcacagtttccatcaacaacaactccatcaattggtatggtttcaccagctttgacagctataactgtgttagtcttgagttcatccacttcaacttcttctccagtctctgcaatcacggccttttgtggagctaaactcatcaaagactgcatcactgcacttgcctgaaaatgtaaataaatacttgagcactaacaaaatctttgacgcatgaatcaaaagagatgggaaaaaggtgcaaaaccttatagctagctctagattggagccattcagcgattgtgaacaagaagacaactactgcagcttctgtgtaatcttgcatgccaattgttgctcccactgattgaaacaaaggaagagcatcaagtgagctattaaatcggatttgagtaattatttaatcaattttccttaacatattttagctgcaacatgatcaagaactcttgaacaagatactataacaaaaagttgtaaacattatctaacataaaaatatttcaaatctttttttattttttgatttctcttttggtctcaaagtagcataaaaatgccaaatgcagagcaaaagacacaaaaaaaaaactacagaacaattgctttgtgttgaccataatatgtctaaattgacccatcaaaatattatagacacatacttatatctactgtagccattagtatatatcttaatattgaccttaattaatattgtgagaaatgtgatccatatcatataaattggagagtgactccctaaagcctattcgaattttagcttgaaaggagttaaaaaagaagaaaaagattaccggttacaacaacaagaatgttgatgtcgattctaaaccttgcaagagatgctacagctttggctaatatcggataaatgccagcgacaacggctgcgacagcgagccaacggaagggagagtaaaggtatttgaagaaggagaggaggagaagtatgccggaaaccaccgcaaagggacttggccatttattcttgaaattggtttctccggttaccctcacatttgcttctaactgtgcttggttcagtgctttaactgcaacaattatagcatttattaggaaaaatgataaaacgttaattatgtgaaatgtgatgcgttacgtaaaaacccaccttgtcattacattaagttaggacacagaacaaaacaaaaacaaatattcggaagatgttaaatattttgaagtgttatgtaaatctacgtagatgacaaaaaaaaaaaacaatctacctaaaattttagactcaacctaaagactagactaactcttttatttttattgcaaaaatatttattttatgataatcttccctatattggatatataaaagatgattaaaggaataaaatactaatagaagtagagatgtaactcaataaaatacctacataaatacaaatagatgtatgtaaatgttaattgtagaattaaatgtctgaaaacgacgtttgcgttttgcaacagcgacgggaaaagctttattaaattagccacagagaagcttttaccgatttggaactgcgagaggatgagagtgtcgtggacgacgatgacggttcttgacggaacaataacagagaattctttaacaccgtccatggaattgagaatattctcgatcaacggaacctccgatgtacagcaaattccaagaacatcgaagtaactcttggtcatcttcttcgacgccattcttgtttaaggattctgcaaaaaaaaaaaaaaaaaaaaacagaaacagagattttattgtgggaatctgatttcttggttcatgtttattttcccaacatgatattaaggggtgcatgtaacgtgttttaaagaaaatgtgtaaaagaagatgggtatgaatgataacgttgtcgtgaagttcactctacaattatttcaggctagagagaaaaaagagctagagtagagatagtgaaagtctccttgaggagatcgttctacattcatcgcaatataaaggttttacagttacatgggggaatatctttagcatcgtaaacaacgtaaacgagaatatagagaatatcatatctcctaatagatagatcattgcaaaatatttttttttttaaaacttctttgaggagcttctctagctagcaagagcatcagaagttaggaggaaaaaaaaaatcaaatgcaagattggctaatgcgagtgagagaaaatgaacagtcacgaaaataatgcaagagagaaagacgtttcgaagccgtcatgaaatatgtgtgaagaagacataagagaagaagaagaagaaggaatcataccggagatagagacagagctagtagatggacagagaacaatgaccgaaccgggtatgttcggtttagatgctttgttaattagccagaagagagaagagattgtttttttttttatgtaatgatgatttgtatttgaaggtgaaagaagatgagagtggccattgctttatataggaaagtgtgttagaaagtggaattaatgattaataatgggtttagattttttcctaagaatccttaccattattatattctttccaaattttaatttcatttgttctgaccaaaaaacagtaaatattattatcttatttgtaaagaatcctctaatatattattcttaataatgtaaattccatatatagaactgtggtaggctgctgcttctttcagattcctattctcttaaccttcccatctattttttcaattttttttaaatgtatgtaaactaaagtaaaattcgattttatcctgacataaaatatttttggagatttgtagttttgtaccttgaaggattcgatattatttgtcggactgcctaattttattttggatatacatgtgtggaaagatgaaattgcgttgcgctaagcacttctatagagattatgtatcgctttaatatgtttagggggtaaaaatacatcaagttgatttaattagtttttggcagtcgtaagtcgtaacatatttttgcaactcgttgattggtaattcatgtgctaatatatatttcatctgacaacatgaatggtaagttattgatagaatcacataccaaaatgtaattatatcgttgtagagactacaacttcaaaatagtttaagaatttggtataagagatttgcgcattcacatgtattttatatgatatgatttcaaaaatatttgagattgtaagcaacatctgagttggaaacaaggagagaagagtagtttattacgtcacgaatttaatttgtgtaaagttttatttttattattgagaaggaaatatgaaaagaatagggtttgttttagggaagaggttttagtcttgtaggtgagtaacgcgagaagtcgagaacaaaggtgtactacaaaacatatggaagaataaacagtacaatgtcatataatggaatccatgtgtgattcctcatttggaatagtttattactctccaagtgtattgattaaacaaaaaaaagtatcaaaattttttgttgtctgcttgcgatttagtgattttagtttttagaacttttattttctttgttaaattatgttaaattctaaatgtcactgttttaagaaaaaaaaatgtactagtagtaaagataaatatgtaattgtgttccagattcaattataggccacaatgcagcttgcagatttgtaacacagtaacaacattactgttcatatatatcattgtttcgtcgtcatcaatataatcatgatcataattatcataatctttgaaatatggattgagtttttcttccatttctttctctctctctctttttgtgtgtgcattatcctcaaaaattttaagtagaaaggttgacagaaaatgaaaaacatattacgagagagctagagaatcagaaaaaaagaatctaactcatttcccatcaaatattccattatatatataattggtgtttaatgtcattattcggattgcaagtattgtggtcaacattttatttttcactttgtgttgtcgattctcacaaaattttccctattatataattattatttcgcgacgatggatcatacgatataacgtcagaatagttctatatactaattatttatcaacggttgaataaataaaggttgaaaattcattaactgtttggacaccaaatttttttacaagaaccatgatctttcctttcctaatggctattagcaccttctaccattgtacaaccaaagattgccaaacctcaagccttacttgtttttttctttttctttttatagatgataatctatacatgtgtccctttgagatcttaaagactactaataatttatgcagcacacctccactatatcttttcaaaaggctttcgagtagtggaggaatcttccaatgtctcaaaacaaaacaaaacaatttactttccttttatttaaaatatatatatcaaagtgaaaaagcaacgtaaatgagccaaacactaatgactaaacagatatcataaactaacatataaagcatgtataatgggaaagggaataaaattgaaatatgaattgcaatgatagatatccttcttttgtgtttcgataagtcattctacttatatttgttccaccacctgatacattaaaatattagttcccgaaacttcggaactttttctcagaatagtaaatttatctttatctgttcgaagtatagtttaatagcataaatttgttttaaatattttcagattttttttcgtatggagtataaaatatgaaagaaagacaatgatacatatagacgagcaaattttctgaattattcagtgaatttgttcttaaaaacttctaattcataagtattgtactatatattatatctcttttttttcgtcaagaagatgtggaagttacctcaatacgacctttttagtttgcgaatatggatagtaatggcgggtcaataatatggagatcgatatggatcatagaatgttgatggatacgtattattgatcaataaaattgtagttttttgaccaacactaataaagtggtcaagtggatgtgaaaaagtcataaacttaagactctcaagcttttacgtaagagttataacttaactctaaaaaactttcttcacgtttactcccattttttcgttctaaccaatgacctagtttttgagtttataatgaatggtctagtttttagtgccaatcattttttagggttaaaacaatgctcaagcatctcgatcgacatatatatgaattccggaaatggtgatttgatattaaaaaatatgctagggcctaaaaagatccagtctattttgcagttcattaaatgattctcgaatgatctcatcttactttttaaatttctttatatcatttgcttataattggtacaaatcatgcaattataacatttaaatgtttgaggaggttatctttgggaaaaatcgaagtgaccagaaacatttgtggatgttagatagactctcatgatccattgcttgttctcgaattgacatgtatcaccttcctttcgtatgatttatcttatcgtgatcccgtaagaagattaataaaataagaaaattatcatataataaccacgataaacgcaaaatggaagtgtataatcagcataagtcattataatggaacacaatgaggttagtggagatacgtcagcagcccacagcccacaatagcaaggatcgaactgaaagtaagttagccaatataatccagaatggtcatatagcaatccttgttcgttgtctttttgacaaatatcgcaactatattttataaaatatatagctaaataatgttttggtggaagccaaaccacattaattgataaattttcttcatttttttgttatgcacatgtagtcggtaactcttgttgtggcgtaatgttccaagtccaacaatcgattagaatagtttttggtaaggcgttcaaattattagaccgcactaaatgttttctaaaagtgaaaaattttacacaacactttttgttcaatcgtcagttgtgtcaaatttaacatatatattaagatttttcgagtaaaagtgacaaatattaaacttttgttcactttctaagacctaatatatataataatttaacatatgattcggccttcatcagttgaagggacgtgaacaaaagtaggagtgctgaagtaaaatatgtgattctaaatgatgaacgcataagaactgtttatttgatattataggtaaagaatatacgaggaatattcgtttgtaattccatatcaacatgtcataatcagtccattaaaagttttttatttccttcttcaaattgctaaaatattttttagagcccttttctctagcaatattgctttgcaaatgaccacaagataaattacctgctaaaatatagctttgcaaatggtaagtgcattgtgattgtacatgactatttgactcagcaaacaatatcatatattgtgaaacggattttaaacaccaaatgaaggaatatgaaaatcctttaacaaaaaaataaagaaaagaaaaagaactcaaatatgatagaaataccatcaaaaagtcgaattaatatttgagtacctaagtcgtcaaaattaaatattaattcgaattaaatagatatgcgaaaatcttaaatatgtattcaaatgaaatcaaattccataaaataattctagccataatatggatattaattgtatatataatttgtcaaaaataaaatggtcttaagatgtagtttcatctaaaattatactcctgaaggggacccaatcttcacagatattcttcttattggtggtgacaattcatattagtgaaacactaaatgtgacactcaaattaagtcactgtaggaaataaagtaatgtggggttttagcactcgtcaaagacacaatgatttctgtgatatgtccctgcttaatagatatgatccatcgatttatccaatggtcatatactcatatatctcagctcgttttcttttatcatcaaaaaaaagaaaagatttatgaatgtttttggacggaatctgagttctgttaaactaaataaaaaataaaaaaattagaaacttacattttaaagaaaattatgtaattttgagcgcacacaaatctactttaaatcaacatatatagatataaaaatgtgcgtaaaaattatgctaattagtttaaatcttaaggataacaataaaattatctaatgtaattgcaaattagtttaaaataaaaatatattgacctcaaaaaaataaagtcttatatttataaatataaagttcatgctaaaaaaaggacttgcatttcggttcaactcaaattttaaatcattggacactaaccggagattgtggttaacgattaaatgaggattaaccgaaataacacgggtccctctctggttttgaaatcaggtatgtagagtttttgaaatcaggtatatacatagaaccctctaaatcagaagaaggttttcacttttgttgattgtccttaggaccactacaacaaccagagcaacaactctttttacttgtctcctcactcttctgcaacaagcccacttctagatcctctacttcatcctcctcaagcttcaccggtgaagaagtagaagcacggtaacatgtagacacggcttcacgctcatcgcgtagaagcatcatactattgagtatcacaagcaaacaagtccccgcatctgcaagaacagctgcccaaaccagagggtaacctacaaaaccaagaaccatgattgctccttttatgctcacagacaaaaccacattctcaatcactttcttatgacttctcttcgctagtctcatccctttaggaatcttccttatgtcgtttgacataagaatgatgtctcctgtctctgttgcaagtgctgaccctgagatccccatggatataccaatgtctgctttagctaaagccggtgcatcgttaagcccatctcctaccatcattgttggcccttggatcttgaaatcatcaataattcttgctttgtcttgtggaagaagttcagagtgaacaatatccaaagcattctctaactgtcaaagttataactttctgattatatgactcacaaaatagagacgggaataataaggcaatagctctgcttcacctgttcttgagtagacatagctgcgtcttggttatctcctgtgagcattgcagtttggattcctaagatttgagttccttaagagcttgagcaaccccatatcgacaaccatccaaaaggttgaaacttccggtcagttttgctcccatgtatatgtaaccaatggtcttacctcgcttcatagtagcttcaatatccggaacattatctaacatccacaaagaaaggattttgtaaaagttagatagacagaacaaaaacaacactcgagacagttcgaaaaacgaatgtagttaaaattgaaaagttcaaagacctgttaagcatccagctctctgtgctattcttttgtttccaatgtagatatcttgaccatctattctcccataaactccttctcctggaaagttctgaaagttctcgactatatcaggcttaggctcaacagaaactgatcttgcgtagtcaataagcgcagctgccatcggatggcttgacttgcactcaatgcttgagaccctaagaaaacatctcaaagtcctctaagcatcaatttttcatcacatacacccaaaaaaggtttaactcctgtggacttatatatacatacaaacttaccagtaaagcaacttgtgcaggttgatactgggagaaagagacctaaaatccgagaccatgaactcagcctttgtaatagttcctgttttgtcaaaagcaacaatcttgatctttgctaatgtctctagacaatcaccagttttgatcagaaaccctgacgtggctgccttagtgagagcacaaaaggtagcaacaggtgtggataggataagaccacagggacaaccacttactaacactacaagtgctaagtgaaaccaatggctaaggtcttgaacctttaacagtaccgggattaccgcaaaacatgctgctgacacaacaacagctaaacaaacaacaacaacaaatgaataaagtttcattctccatccattacattgagattatgatctaaaaatatgattcattacctggagtgtagtagcgagagcatttgtctataaacctttgagttttggtttggcttttttgagcttcttctacaagcttagtcattttcgcaaccacgcagtcccgggctagagctgtagttttcacctttatataaccttagcatacacaaaattatggcaatgagctgaaaactttaggatcatactttagaagagcaagagaatgatattgttttgtaccattaagatttatggttgcagccataacagttgactctctctgtttggagacagggaatgattctcctgtcaatgttttctcatccacatcacagcttccatccaccacaactccatcgatcggtatactttctccagctttaactgaaacaacggtgttgatcccaacctcatcaacatcaacttctagtccagtatccgcgatcactgccttccgtggcgctaagctcatcagtgatgacattactatgcttgcctgaaaacaattgttacttcagaacaatgatcaactgatagaattaatgaaaaccagaactgattttcacatttttgtatgactatgactgtttaaaatcatcaagaaacagaaaccctagattaagtaaccttatgagcagcactagactcaagccaatctgcaactgagaataaaaacacaattgtagcagcttctgtgaaatcctgcatacatagcgttgctatcactgttgaacaaaattaaccaaatcagattcatttacctcatcaaacaaaacataagctgatgctcagggaaaaggatttgtgttttaccagcaattagagtgagagcgttgatgtcaagcctgaaccttgtgactgaagcaacagctttagcaagaatggggaaaactccagccaccacggcaacaatagcgagccattcaagcggactataaaagtatttgaagaaggagagaactagcagtacaccagaaactattgcgaaagggcttggccattgactcttcaagcttgtttctccgtatggtctaacacttgcttctagtcttgcttgattcagagccttgactgtcaagaaatcaattttacacacaacaacaaaaaaaaagggtttaattgactttaagaaaacgtaaacctttgcctcatcaatagaccaatgattcaagacgaaagtcaaaacgtcgattgaaaaataacagtttctgttacttaccgatttgaagtggagaaatcaaaaaagtatcgtggacaacgatgacggttctagaaggaacgatgactgagaattctttaacgccgtccacttgacggagaacgttacctacgatagaaacctccgatgaacagcagattccaacgacgtcgaagtaacttgtctgtaaattcatcttctttgactcttcaccttccgccatcgttgagcttgagatctcggactaaatttcgaggagatacttttacgggatgatgtcggagggaaattaattatttggtttaggcttacattattatttataacatttgaaattttcagtctctataaggaatgttatattaattgctccacgattttttactatttccaaatgtcaatgctgagattggatacgcatttaaattttattttattaaccatgtaatttttgaaagatttacatttatttaatagaaataaatattaataaacaacaattaattagtcaattatagtagattcgattttattattgaaaaaaaacacttcaaaacctatatagttttccagatgttaaagaaaaaacctatatagttgatatattaaaatcttttttagcaaataatatttgagcagatagaatctaacaaattcttctaaatcaaattcagattttgttattaaagaaagagaaaagagcctattgggccataacatgggttcatacaattctcaatcagataacttccgaggccttataatgacttgtaatataaatggcaatttcgtgattaagtgagtatgaaagggtagacatgacaaaacctaactacagtaccgaggtagccaataatttatcttggctggggccatactctgaccgcagtttccattaatttacagaaatacccacgcttgggatatatatgtatatgtaaccataagtgtaacattttattagttttcagtcgttttccaaatttatgaatccatttacatgagacaaaccaaatccttgttggtaggtccatcctttacactattagaactgaatcatttttatttttctttcacaagaatagaatatttgtcgtaagcaaagaaacaaaagtaaggttaaaaattagtaaaacaacaaagggttgcatgtaacacaaggtttagaaggaataaaataaacaaaagttatgttagtaacgtctttagttaaaaaaaaagtttcatagatgaataaaacaaacaaaattgcatgtcccacgcagctataaaataagaaaaaaaaaaattgcatgtcctaacgccacctaataataaataaagtgaaataataagacaaaccaaaacaccattgactcattgagactgatgtcaaaaaatgagaaaaaaccaatcacattgagagttgagattttaaccaatgcaaggacaatggcaaaaccgaaaataaacgtaaaaatcgaggttgataataacataactcataaaatccgtattttcatggtgtcttcttcttcttcttcaccttcttcactcatcactactcacaaatatatttttgaccgttgttcactctcaccttcttcacacgctccacatcttcttctgattgacctttaacacctgaaaggttttgtcttctctctctatcgtccaaaaatctaaacttttctggttttattttatagatttgggtccctcagtttgtttattttacctttatttatgaacaaatgtgcaaagggtttagattttagctccttgaaggctcataacgcataaagttcttggcttcatcgttttctctcttgattaatttggcattgtatatcttatgtctgattgtgtgaaaaaaccacaaatgaaaggagtttagacacaaatcacagtttaagacaaaattatagtcttgtttctttcaaattatgcaaaaaaatcaagaatctgagacataagagaaacgtttatgtctctctcttttaatcaatgctatgttgcttttctcaactgtttcaagcgttattacattactagctaaaaatcttgatgtcttgttcttatttttgcagtttctcctcttgagctttggaattgaagctaagataagaaatttagagagaaatgggatgttctcattcgaagtttgatgacgatgaagctgttcagatctgtaaagataggaaacgtttcatcaaacaagcagtggaacataggactgggtttgcttctggtcacattgcttatatccagtctctgaggaaggtttcagatgctctccgggaatatatcgaaggagatgagccacatgagttcatgttggacacatgtgtcactccagtgaagagaatgagcagctcaggcggcttcattgagatatctcctccttcaaaaatggttcagagtgaggcagagtcgaaattgaatgtcaacagttacttgatggctagtggaagcagaccggttcgggttgaagaaaagcctcctagatcacctgagacttttcaggttgagacttatggagcagatagtttctttgggatgaacatgaacatgaacagtccgggactaggcagtcacaatataccgcctccttcaccacagaactctcaatgggatttcttttggaatccattctcggcattggatcagtatggatacagttatgataaccaaaatggtatggatgatgatatgagacggctgaggcgggttcgggaagaagaagggattccagatcttgaagaagatgaatatgtaaagtttgaggatcatcataacatgaaagcaacagaagattttaatggaggtaaaatgtatcaagaagataaagtagaacatgttaatgaggagttcacggacagtggatgcaagattgagaatgagagcgacaagaactgcaatggaactcaagaacggcgcagtcttgaggtgtccagaggaggaactacagggcatgttgttggagttacatcagatgatggaaaaggagagacacctggtttcactgtgtacttgaatagaaggccaacaagcatggcagaagttattaaagatcttgaagatcagtttgcgatcatatgtaccgctggtaaagaagtctcgggtctgttggaagctagtcgagttcaatacacatcctctaatgaactgagtggtaagatttgtacttttctttgtttctgactatatatatgaaacgaatgtggttctgagacttcttattgcagccatgacaatgctgaacccagtagctttgttccgctcaggcggctcatcgagatcttcttcctcatcaagattcttgatcagctcttctggaggttcaagggcgagtgaattcgaaagcagcagcgaattttcggaagaatcttgtatgctctcgggtagccatcaatcaacattggaccgactatacgcgtgggagaagaaactctatgatgaagtcaaggtaataactgagacttctaatagtattttcagttcacctctctctggttaactgacttgaatgttgtgacagtctggagaccgaatacggattgcatatgaaaagaaatgtttggtgctgaggaatcaggatgtgaaaggagctgactcttcggcagttgataaaacaagagctacaataagagatctacatactcagatcaaggtctctatacactcaatagagtctatttccgaaaggatcgagactcttcgcgaccaagaactgcttccacagcttcttgagcttgttcaagggtatgccaaaacatctttcttgtttcctgaaaacatatgtttctctttgactgacaatggcattttacagattagctcagatgtggaaagtgatggcagagtgtcaccagatacagaagcgaacattggacgaagccaaactattacttgcaaccacaccttctaaccgtcacaagaagcaacaacagacttcactaccagagatcaactctcaaagattagctcgatcagcattgcatcttgtggttcagcttcgaaactggagagcctgcttccaagcatggatcacatcacaaagatcctacatactctctttaaccgggtggttactcagatgtttcagatgtgaccctgacccagagaaagtcacattaacgtcttgtcctcacccaatttatgaagtctgcatccaatggtcaaggctactcaacggattaaacgagaagccagtactagacaaactcgacttctttgcctcagggatgggtgcaatctatgctcggcaactaaaggaagacacgtctccggtaacagattcttcgaggaagtactcaagaccagagagcatggagcttgttgaagctgagaaagtggaagaagagaagataatgactgcagagaaactagctgagattgcagttaaagtactctgccatggaatgtcagttgcagtgagctcactcgccgagttctccattagctcagccgatgaacactcgaagctagttacccatcgagaggaggacatgccagagcaaaccaagatttaaacttttctattctcaacttctcatttatttatttatatatccttagaagattaggactttaggttagattagccatggaagctgcatcatctactatcaaaagatagtttagatggatggagatttgtgtaatattaagacacataaagttagttcagttagacttctaatttgggattttggtcataaacttatctttatagaaccaaattcattacaccgtgtcttatagtcagaatctttatcaaaacctgtctcttctaaactaaatagttgcagaacaaacacaaaaagatgaatctttagaaagaatcttgatggtttcttgaactcaagctaacataaagatcgatgacaaacctgaatcaattagtgaaagtgtaattaagaacaatggaaagtgagcttatctcttgatcgtctctcttccatgatcggtcactgtaagctcgaattcgatcggagtttcgagaaaagatcagttggatcgggtttgactttttgacatttggatacaattaaagcctttttgtttatttgccatcctatttgggctttgacaaggcccaaatcaactttgtatatagaatcggcaagaaaatactgattttcttatatattgttgatcaatatgttaccatccttaatttcacttcttttgatcaatccgttttattcattattcagtctatctgatatattattccatcattattacatatgtgtctgatatatggtttcaatctagacgaaaccaagttttaaataaagggactatgccattttaacaatggaatagagccctaattttaattcactaactgggatatgttgaacggactagctataggtccgttaaacgctgcgttagccaccacagtatttatcacttccgtagtatgcacgttatcccagaatatgaatttgtttctgtctggacaaaccggtccgttcgccgcacaaagttcttcacccggattaaccgtacagcaactcctatcaccaaccgtaatccctacaatatttcaaatgaacaaattagtgtcggtaacaatttcatcgtttttcttctaagtataaaattacctagagcggcgaaatcttcagcatttccagagaagagatcaacataagtgaacatagctcccggtttgttgttgaaatctgtgactagggctttgagtttagtgttgaagatgatcacggcttggttcacttcttctgcgcagccagtgccgccaccgagggtagcaacaatccgtggtgtacatccgatcttaccgataccgaacaacgctacattcctcgctcctagtacgtacaattgctacacattgtcacatacaaaaacatatcaatgttaagatatcccacatatagaaaatgttgctctatatattctagataaacgaatgcatgtatgccataatcatataatgatctaatacttaccgtcagatagatacggtagaggcttatgagagatcgagcgtactggtcaggattaaatagacgacgagctagagtaggaggcgacaagaagtagttgttgaggtaatcgttgcttccgatgttgattgtgtatagacattgccttaaccgactcagtggcaccgccgcggttatgatagcggaaaagtggttgtttacttgctgtctcaaactgattctctcaccctatttatatgttcaagattttaggtttttttaaagtattatatatatttatttatcgtagggttgttaccatattttcgctggtttcttcgcggataccgccggcaccggaagcatagttgagtccgatgttagcttgtgcctgtgatgctccggcaaatggtggaattgggttattgaaacccgctagttcagctaaaagtaaaaatagttcaactttgttaaatatatgaactattaaataaataataatgagacaagacgcttgaattaatattaatctgataactttgaattttcttttaaaatatatttttattagtattgttgaactccacaacaatgaattttcattccaaatataattatactcttttaataccaaagtatatgtttgttttggatcggattcaagtatactaaaatatatgattaatgtaattaagtttgactgaaattttaggaattcttctcaaagttttggaaatgtttagaattttaagattttggtggtgattttagaaagaaaatataaaatgctgtattttctaaccttgaatacttttttgaaaaaaaaaaaaagaagttcatccatatccaagtgatgttagaaaagaaaatttaaaatgctgtattttctaaagttaaccttcacttctttttttgaaaaaaataaattcatgcatatacagtttaaacattatggacaactgtctttataatttttttctgtaagaacccgatcatggtcggctatatgacaatcgaataacgtaagaaaaaatggattcagctaattaaatcaagaaaaccggattgaaaacttaccgataacgtctggaatattccgaccgttgctaaaccgaccggttggaccttgaaagtaatctataccataaggtaaatagttgaccttggccttggtgttcaaggcattgttgttaccgttgtcgaagacagagtctccaaacacgaagtaacacggcgtttgctgtccatgcaccgctggtgccaccgccgcgactgcaaacacggtggccaaaataatccacaatgccttggactctccctcgaccatttttcgcaaatcgaattatacgaaaaatgaggagagaagaaaaagcttgatgagagaagaagaaaagtgggcttattgtattatatggactagatttgtaagtctgatggttagaggggattttgcttagacaagtagaaaattatgcgactatatataggatgaggcagtgagtgaatcaagggagacttggagaactatataaattgttttgcatgaattaagaggtttttcttttaatattatttatttgaggtggacgtgttggtaatattattattttttgttaagctgaagaattgtcatgtaatttacttatgtttactaaaatatatgttacaaaatacacataggttgtttttttccaaagcatacaaataggtagagaaagctttatatatatatatatatatatatatatatatatatatatatatattatttaaggtggacgtgttggtaatatatatgacggctgtaaaattttatttgtaagaaaaatatgaaaaaggtataattaataaaccatagacaaaatctttcaaaaccaaacaagtgcataacgatcccatgcaaaaagtttggttaagaattaggatatgccagattccaccaaatgcaaatgaaacctaaccatacatgctttcaatgacatcttcaaaatgatccacaaatagtttatcgttctctgcatccactaataatttttccttcactcccaataagatattgtagtgaaattactaacttgaaaatatacttgggctaaaattcaagtttgtaaatgtatcacatattttcttaacaatatgaaatcatcaaaattaaatataatatatcaaaattcgttatagtttatctctcaacatcgtaattgtagtgtatatagatgtttattttgcaacaaagttatacaagtttaccgttgaacaaagatatgtatatacattgtggccgtgtaagatttaaaagaaaaacaaaaagaagttagttaattggttaattagaaaaagggctacaaatgccgtattgagaaggttataccgtatactcaacatatgtttaattatttgactatatacaaattaaatttgaaatccgtgtctaatacggatcaataagtcaatgtctttcattattcggtaaaataataaaaacagatttgttttgaacgagttggccactttctagtaaccataatacgatatgccttttttttgggtcaacttgtaactataaactttgatagacgacttttcatattgtcttattgatgatgtaactagttctttatatttagagatggaccagatgatattacataataggtaatgtagaaacatgtattatcgaaaatatattatatgtaagtccccaaaacaatgataatatgatataataactaaccattatccaattttaacactcaaccatttataatttgttgaccaatgataacacacaagaccttttattgaggtaactgtaataatttcattttttgggggtcaaatgttataagtctaacaagagtgtttcttacaaaaagtctttacagtgttaattatccaaacaccatactaaataaactcaagttgatcacatttttaacatgttaacatctttgtagatatgaaataagagttgacttttgaaaagagtttatcaataacaatgttacttctgaactttcatcacttgtaatggcccaatgggcttttttcaatgaatccattaatagacaaaaaccaaaaaaaaaaaaaaaaagtcgccgtcgatttgtttatcaccgactcaaccaccggtagggtttaaggtttctcatacactctccttctattgccgccgtaataatcaaatcaatcttcttcttctcctctaacccaattttggaacttgaaagatgttgaaaaggaagcttacgagtccgaagaaatctaagccgtcgaagaagacgaagaagaactctaaaacccaattcgatgattctccagtagaggtcgtagaaaccaaagctgaagagcttccgcgtacgggttcgaagaaatcgaatccgtcgaagaagagaaagcagacgaagaagaattctgaaactcaatttgaagattcttcagtagaggtcgtagaaaccaaagcttgtgaccaggaggaaacggttacggacattgttgttgaagagggtccatggaagaaccttgaactcatactttcgttgcagagcaatacattgggctttaaaaagtaagctctttgctttacttgacgatgttactgtttatgtttgctaaagcttgtgactttggagaacataagcaaaaagtaccaaaaatgttgctgatatgtttgttgtttatgaaaggtacaatttttattgaataattaaaggaatatgatttgcaggaaggtggagttggcttttagttttgttaaaggttatggaggagaaaatgggactaatgaggatgaagaatgtcaagcggttaagatatcgcggctgattatatttctcagcgactggatccagtctcttttgattccttcagagaagaatattaaagttaagtgtgatttagattctgaaccatgtttggacttcaggtgttgggagatcttcagtttctgcttgaaggaggcgacaatcttgggagtctctttaaatttgtcaagaaacctattaaaggctattgggcttatcacgggaagatttttatctgccctgaacgaatccttggctacgggggttgatttctgcaatggtcaaggttttgtagtttacagttctgtggttgattgtctcggcttgttattttcatcgaaaagtggcatgtctaatgacaatttagacttgtggttttcgactgttgaaccagttctgaagctcacacatacggttcttgtagagaatatcaaggatagtcttggtgacagacatgtccttaaattctcttgcttggttcttgagccattctctaggttcttaatgactcatccaactacgaagaatgggttttgtgattttctggacaagctttttgagccatttatggatgtgttgggtttattaaatctcatcgaggacaaaaacaaggatttggagatatccttgctgaggttgattgaagacatattatctctggctctgtttcattcagctcatattgatgggttcttaggcctgggtggagcgaaaaagtatttaccagaatcgaaagagaacaaaactattctgaaaagctatcatcggcatttttttaccaagttcaaaaatatgctattaatgaagaaggagttggagctgagctgtatggggtcattgtttaaagtgtttatttacagagtgatgaaacaacaaagagatcctaatcagttgcaggaaggcatgatgacaaaggcctcaaatgcgaggcaagcagaagaaaggccatggaagctggcggacacagctacaaatgataatgggtcttctacaaaaagtcattactcaagttccctccggctggagacacgaaaatcaatttttgatttcttcctgcatcttatggaacctatattacttgagatcaatggatataatcagtctggctctgaaatggctcctttattgggtgatttttgttgtgttattaagtcagcaaatagtttgctgttcaactttgctcatgagcgaatgtatgtgaagacagaagatgcatctgaaggagcttgctcttgttttttgaggacgatcttcaaaacaatagtttcagttgcttctgaattaaagaaacattgtccatatgataatgggtcagagatgcatgttttgttagccaaggagctagtaaccgcaataggctatctgttacatattgaatacgaaatcattgagagtgatttagttactttgtggctaatcattctctctttcctggagtttagtagtttgtcaccagagaattcagaaggggactgcccgttgacttcattgttagttggccttggatgccagctgataactttatatagtgaccttcgccaggtttgtcaaaaatttattccttttcagtggttgcgttttctgccttgctagtatctgttatgttcttattttccttctgaagaatgctaatttgttccccggatgatgtaggtaagtgttgctgtattttctctgttcaaagctgtaaggcttgtgatgcctgttgtgacacctgctgatggtgatgatgatgagatgattgccactgaagagcttccactatcaactgtgttccctttccgtttagagagaagtgaaaaatcagtggaaaagctcttgtcatctcaagctttaagacttgctatacataaagctattaaagtgataccagaaggccaagcaagtggttgtatcaagagcttgactgcagatgtatcaaaaaccatgaaatggataaaacaagtttgttgctcaacaggtgctacagaacaagatggacaggtggcagcattcttggctggatctttgtctgatatttattcactaattctcgactcaataactattacaacagggaatagtaaccttgttggccagtccatgaaagatctgttggatctcatcagtccttgcttaacccacctggtttcttcagactccgattgcatcgaaaatttcctttctgctctcaccggaaaagatttggagattgtgatggctgaaaagaagatagagacctacagaaagtctgtgcgcttgtttgttatattcgtcttgcgtatttacatgtcttccagaagcttatataggcaggtgattagtcttatgcctccgaaaaaaacaaaggatatggctggtattaagggcgactctgttgcagttcgttgcggaagcgattggataaaagagaaaagttggaattatgaaggatatttttcatggatctcccaaccttctgcttccattgttgacactattaaacacatttcagctttttaccttaaggatgacagtgcagattgctccttgctgatatatatattgtatggagtcgctcttcagagacttgttgatttaaacagccacataaaatcacttgattatgtgtcacagataagtgataatcagataaatgatacaatgctcaagcatgtatcagttcttaagcgtgaaggagaagagcttactgatttccttttaggcaacaacatcatatcaggttttgttgatgatggaacatttgagacgataaaagacactgatcagtgggttcttagggtttctggcatcaacgggaagtgtttgcctactatgcgtttgtgggttcttagccagcatattgatctttggtgcccccatgcaggaaaaaagaaattgaagaatttcctgtctcagctaataggtagttccgttccttgtatattgaacggagtgggtatgtctactcttggctgggaaaataatgtagacaagggctctcaaaagaagaaaatagggttggaacagttctcgtttggacttctatttgattcagtactgtatgaacacgaagtaagtcatctttcattgtgcgaagttccaattccatatttactttgtttctttaagcgctatatccagacattcatttgagtttttcgacaactagtttgttcgcaggtatttggccccgagtttttctcacgtactgaaaatgacagcagaaacgtttttcaaggatattactgaagaagtaaactttgattctccatcagattggtcagaggtgttaattttgcttgaaagttcaattgctaacttatctggaaagcttaaatcagaagcctttctagaggcacatgtgtcactgctggacaatcggaagttcacagcttgccaaaatttgctaaatctgttaggtgtgatgcccaaggagtatacgaataagaagtcgttccaactttatgcaagttatgttctcgaccttgagaggtaaatgatagtatatagcatatacctttcttgtatgtttgctgcagtaaagcatgtcaataatccttaaaaatttcattggcaaacattttaacaaatattacttttgtcatcatctcttgtaggtttatagtttttagcatgttgagatgtttgaacaagctgtcctgtggtgatatgcaaaaccttttcagccttttcagtacttgcagaaaaactttgaaaagtattgctatgatttcttgcgacaaggtactaggagctaccaagttgcctttatctgatagttcgttgttggcttcttggctttttaaatcagcacaagctgcgacttgtcaagtgagatttaggaatgatgttacaggaaaagcaagggacgccctcttttctttgatggatcacacatcgtatatgtttctaaccgtaagtaaatatcaatttagcaaggcactaccattttctgatgaaaaactcatttcatcagaaatttctgagggaactggacaagcgaaccttataattgagaacttgacagaacaggcagaaactctactaaatgctttgagggctaccttcagagatgagaaaacagcctttaaatgtgagagtctgatactgaacaagttaacacctatattttcttgttttagtgggttgttgtggggattagcatctgcagtgagtaacagagatatgcagaagaatcatcagaacgcaaaactgagatggaaatcagaacagttctcaaagctttcccgcattatccatgtgcttagcaattttttcgaggtttttgcacagtgtctgtttcttagtggtgatgtgcagcgagaaatccaaaccaatatcaactggaccagattgcttgatgggaccgagggttcaaatggtcttgtgtgtggtgacgtagtagagactagtgatgtgaaaaagaaaattattgagagcttgataaagggtgattcttcagaagtagtattggcactcaagcatctgttaattgcttctgctgctattttaaggttaaacctgcaaattgatggcattacattctcacctacatttgtctctgttctcacgaacatttcgaatgatttactgtctgtattcgctgacatgagcgaggcaccacttgaattctcatttatttggttggatggtgcagttaaagttgtagaagaactagggagccaattctgcttatctaaccctacattaaacatagatctgtactcaaagttgattgagttgcacctgaaggtgattgggaaatgcatatcactacaaggaaaagaggctaccttggaatctcatgagacaggatttggtactaatgcaatccatgctaagctagtgctaacagaaaaaaaacggtctcacagattgcattggttggacgaattaaaacagaggcttaggatgtcatttaaagtgtttatacatagttcctcagagctacacttattgtcaggagtacaagctatagaaagagcactggttggagtatgggaagtgtgcccagctatctattgcatacagactggaaatagagatggaggcagaatttctgaaaccgtcgctgctggtcttgactgtctggacctaattctggaacatgccacaggtaaaaattgttttctaaaaggcaatcttagtaaagttgatgttaaaagttgtaacagtgaacttacagtaatgaaacgaatctagttactatttttttctgaaacacattgggaacccaaattttgatgtttttgctgaagttatcattattgcctatttgactgaatagtactattgttttgtaggtcgcaaacgtttgaatgtggttaaaaggcacattcaaggcttaatgtctgcagtgtttggtataatggctcacatgcagagtccatttattttcttctcaaatgcagtcgttggcaaccagggttccaattctccagattctggggcagtcattctcatgtgtgttggagtcttgataagaatagcagggaaacacgctttgtttcggatggattcatcccacgtaagtcaatccatacatatacccggagcaatttttcttgattacctccacgcaacaagggtgggattctcggttttggatggaaatctgttatctaaggatgatcagcaacaagatcttttaggatgctcaaaagaacttcaagtagacaggaaattctcagtgagcctgtatgctgcttgctgccgactactatatacagctgttaagcatcataagaggtaagtagaattttattttgcttacacacaaagtcctgttaaattttaccatcttagaactgcgtctaattttgttcttgctgtgacatatcaacatctagtcaaactgaggggtccattgctacactccaagaatctgtttccgcgcttcttcattgtctggagacagcaggaaaaaatttgggtaattgtgtttcatgggaagtggaagagggaattagatgtgcttgtttcctccggaggatctatgaagaggtacgtcaatgaaaataccctttcttccttttgtgtttgagaatgcaaaactatttcagttttaccgatattgtggactaagaagctgtcaactaagtttacatattcgtttcaacggaaattgcaattaagatcggatgtcttaatgattctacaactagctgtgtctcatttttgcttataaaacaactggattgcagctaagacagcagaaggaggtctttggacagcattgtttcaagttcttgtcaacttacatatgggtttcttccggatatggacctcttaagacgggtcttgaaaggtaacattcttctcccatttatgtctctcttcatacattttcccttctcgtaagaacgttcatcagaaaagagactatgaactactactaactgcaaatatggcttaatggtgtttgtccttaagttttactagccaccaaaataagtaaatacgaattaattgatttttgcaacttttgcagggaggtagatgaagctttaaggcctggtgtgtatgctcttatagactcttgctcacctaacgatcttcaatatctccatacagtatttggtggtaaataaataccctttttacttgcaacatcttatttttttgttttttttaatgttccaattttagaatcggtttttgtacataatttgttcgtccccttctttctttgttcttctgcagaaggtccttgtagaaactccctagcaactctgcaacaagactacaagttgaatttcaagtatggaggaaaagtctagaaaacttgcgattacttttctacctctcatgttgcggctgagtctttgggggtggggacaatgggtgttgctctcttgttgaatttgtaaagttgggcattctctaagaccagagaattgtcacttttgttcttattgtgttcctttgtgaaagtacaataaaatgcaaaccacgtaaccatgtgtttttgcctaatatagtaatatgattaagattttgtttcacaaaactattgtttatcttctaaaccaaaatatatactatatgctaatctgcctctattaaataaaaaataaataaactgcgcaataaaagaaaaaaaatcttagatattttagactatttaatttgggcaataaatgttttaggatttttaagaatgaaggatcgtttgtggtagactcttgcctttgtgttgtttttgtttttgttttgaagatggtaatggtatgtcaagtgagaaaatagttaggcatgggcataatacccagaatcgaatacccgaaccgaaaaacccgaaaaataaccgaaccgaatccgaacctaatttttagaattacccgaatgggttctaaacttcactacccaaaaaaacccgaaccgaatctaatacccgtgggtacccgaatacaaatataaacttaaaaatattacttatatatatatttgtaatacctcaaacacccaaaattaaaattataaatccgaatatattagatattttttgtaattcatatacatttggatatatttaggattaaagtaaccaatgttatagttttcttttagataatttaagtattttggttacatttggttatatttggataaaaagtaatcaatatatttacgggtaatcgggtatttcgggtagatttgggtatatatgagtaaaaaacccgaacctaacccgaacctgaaaatattttggttatttttggttatttttacatttttactaaaataaccgaaccgatccgaacccgaaccgaaaccgaaccgaattttaaaaatatccgaatggttctcaacctcctacccgaatagacccgatacccaaaaaaaatgaaccgaacccgaatgggtacccgaatgcctacgcctaaaaattgtaatcgataaataagacatgatttaacgctaactagagaaatatgtatattgattcttgtctctttttttttttcacaatactgattcttgtctgccactaaacaatcacactctttgctaggaatttaaataattatattttattttaaaaaaaagaaattcccaatgattgtcaaagctttgataggccacagtatcttgcctattcacggcggctccgaccatcagtttccacggtgccggcggctatatacgatagtcgttgtgaagaaaaaggtccttttcgtcaaatcattttacattggagccgaaagtgtgtactttactttggtcggtttttgatattttatcattactttattctgaaaataaaattaagtttgatgtattcatttcttgagactttaaagacaatagtagaatatatattctccttgttataaatatgattgggtgacatggtacgaccgcgatataaattctatatatatcatcaactctgatattaagaaaaattacgataaaacgaaaggatataaaaaaatagtcaaactttagcgatataacaaaaattattgattgtacaaagttttgtattgctgtcatattagaccgtaaaattttatgacgatcccaattcccaaccctaaactaacaccacaattattgagcacattcaaatgctgtcatttttattactcgtacgtacacatgaataaggtggaaatgtcatatttgggaaaacaccataaaacaatatgtatgtcgttcactttggtctcatataaacgctagccaaatcatacagaggtaatggtaatgtttttttatcgacggcaacgaaagtttatgctaatatgtttataaattacttttattgattaatatgattatctctgtatagttgtggacgtgtgtatataactgaccgtctaattaaagaaaaatttatcacatcacgtacctaaaagacgttcttcattaatccataattgctttagtgtataactaatcatctatttagaagttttttgttttacttttcctattgttaatgtttgaaagattagaatatatttataagaagaaatttataactttttagcaaaaaaaaaaaaaaaaaacttataacttatgaagtctttggtatgtatattaaatttgacctgatcacaagtaatgcacgtatattcacgatttgaggtacgaagcagatgaaaattgtactatttaacaaaattactaaactataccaattaccagacacataaaatctagataaagtggtcctaatttctgagaaagaatattcctgtgttcgttctttctatctctttccttttctgttgttacatttcccacacacaaaaaaaaaaaaaatctatttactgatctatgttaaataaaaatcaaaaggaaattgttttatgatttttattactttatattaatttaattgatgtaataaattattaaattaattcttggaaaattaatcaaattaacttaaatcaaacaaaatttagttaaactaataaacactttaaaataaaaagtttaatttgattaatttagtcagttatttattaaactaataaacactttaaaacaaatttagttaaactaataaacacttcagttaattattaaatatttatgagaattctaaaagattaatccttatgaaacagaggaaatatattttaagatagaaaagagatattaagaaatctcaaattaaaatacaactcatatttgacacccataagcaaaagatattataatactaaactacttatcaaagatatttcagtttattgatatgatcagaatttggtcaatttttctgtcaacaaagattggtctaaattaatgacctaaggaagcgaattaattcattaagaagactttttttctttctcaaaacttatgaaaattaacccacttctaattaatcatcaaaaagcttgaaattatttgtaaacgaagactagaaagagagaggggaaaaaggtatgacaaacagccttaaagttaaaggtaatagtaccttttgtttgttcttctttttttgcaaacaattttttcccttatttaattacgtttataaaccttaattcagattccttaaatacattgttaggactccataattagtaacggcattaggagcataaacaaaaattatgataaaagttttgatattatggaaataaccaaatatcttacctgtaaataaaataaagagatgtgaccaaatttaattgtggatttaattacattatctaacccttgaagaaactcaatgttttttgtgggattgttgtcctaaacctgaggttacatgtaatcaaaacattaatgggatttgaagtaaataaattagatttgcgccaaaaaaacaaaatctccattgattacagtgttttaatatggtcagataaaaccacagaagtggtaacgacataaaaaatcaccaccaaacataaaaccgtaagaaaagtttcgatttttattttctgcgatccaaaggtctagtgatgaattgaatttggtttttgtttttataattgaagaatgaagaaataaacagttgatgggttcttcgcttcttctcttgttgggttagtgataagcacgcctggcttctcatcattccctccaacctttctctctctaaaagacttcaattgttttatcagcttctctctctaaataaagctctcaattcaattctctctctttcacttttttttcctctgcttgcttcttctgttcatctttttgcttcgtcaaaattttgaccaaagttttgtacttttttgttgctgcaatttttgtgattagattggatctgggcttggagctgaatagcggatttgtataaggtaattgcttgaaacgtaccgaattgattcgtttttttgtttctctgagatttttcaatatctgggtcttagagtttggctgatctgattggttctctgagattttcatgtagataagtttgttttaaaagccaaagccttagtttttaattagtgagatagatttatgtagagagcatcaatgatcaatccttgagctttatcttgggttttgttatgttgtttattgaaaaatggtttgttcggtgagtatgatgattatgttcaatggaaatgttcttccttttctctcgaatttctgagttttgctttggtttcatataactttgtttgtttgtctggggaattgtgaaatttacataaccactacttccgatgtaatataaatatcagagcttttctttattgacagagattttttgacttgagatgaatgatgttgacccttgtggattctgagttgatttttgattctttctaattggtttctggtttctatttctattgatcagctgaatccaatcatggtcttttcagtagtgtatgctattggtgaaaatcaatattggtttcttcgccttgcttgtgatgccttgtctgctatcaaaatgtgtcatttgattggtttttgatagaattgatttgcatttgttgattcttgagattttaatcttagttgatgttgtctcataggttattattagtcttctctatcgttgcggcgttcataagtggagaaagtggtaaagactgcttaagtatgtctgtttctatgagagatttagatccagctttccaaggagctggacagaaagcgtatcctttaactttgattctctcatattgtttaagactcctatagtaaagctgctatgtttgaaatatctacatgatgttctccttgactataagttagtggtattgagatatggcgtatagagaatttcatccctaccccaattccaaaatcttctattgggaagtttttcaccggagattcttacatagtattgaaggtaaataaggcctagtcacaagttcttttttgtttccttattgccattttactcgggctttctgctgatcgatcttttgtgaccagacaacggcgttaaaaactggtgcattgcgccatgatatccattactggcttggtaaagatacctctcaggtaagaccctgttattatttcctttctttttttactttcgtagaatgacggagaagtttgagagaaactgatgatttttctcaaaaacaactaggatgaagccggtactgctgcagttaagacagttgaattagatgctgctctaggaggtcgtgcagtgcagtatcgggaagttcaaggccacgagactgagaaattcttgtcttattttaagccatgtatcattcctcaagaaggtggagtagcatcaggattcaagcatgtcgtagctgaagaacatattacccgcttgttcgtctgcagaggaaaacatgttgtccatgtcaaagaggcaagtcacatttcacttctttggttctttcatctcactttgtagtcatactctaacggtctaaattgattacaggttccttttgctcggagttcattaaaccatgacgatatttacattcttgacacaaagtccaagattttccaattcaatggatccaattctagtatccaagagagagcaaaagcactggaagtggttcagtacatcaaagatacttaccatgatgggacatgtgaagttgctacagttggttagtgagctgagcggttggattagggactagtatctctatcatctctttgctttggtctctaactgcgtatgtttcaattgcagaggatgggaaacttatggctgatgctgatagtggagaattttggggtttctttggtgggtttgctccgctacctaggaaaacagctaatgatgaagacaaaacttataattcagatatcaccagattattttggtagcttcttctcgtcataatacatatattttgtgccataatgcctcaaatgaacactattttctttactgaatttgtagtgtcgagaagggacaggcaaatcctgttgaaggcgatacattgaagagggagatgctggatacaaacaagtgttacattcttgattgtggaattgaagtgtttgtttggatgggaagaaccacttctcttgatgatagaaaaattgcgagtaaagcagcagaagtaagttttttcaaaaaaaatcgaaagaaagtctgaataattttgttgtatgccataatgtttgctgatgttagtagagccatacaggaaatgatccgttcatctgaacgaccgaaatcgcaaatgatccgcataatagaagggtttgaaacagtaccattccgatcaaagtttgaatcttggactcaagaaactaatacaaccgtgtcagaagatggtagaggcagagttgctggtccgtattactgaactcaaaattggatgatgattttaaatacgtacaggtagctgaaggttatcgtggtttttcttttgtcatttgttgagcagctcttttgcaacgacaaggagtaaatgtcagaggcctgatgaaagctgctccgcctaaagaagagcctcaggttttcatcgactgcacgggaaatctgcaggtttggcgtgtgaatggtcaggcaaagactctccttcaagctgctgatcattcaaaattctacagtggagattgctatgttttccagtattcttatcccggagaagaaaaagaagaagttcttataggaacgtggtttggcaaacaaagtgtggaggtaacagaagcaaattcttatatgattgtgtcacatagattctgtggatgtgtatgctgaagcagaacttgcaagtaggttcttaattgtcaatttgtggtcatgtgtaggaagaaagaggttctgcagtctctatggcaagcaaaatggttgagtcaatgaaatttgtcccagcccaagtaatattcttctgcattcattcaaaaactctatgctgttggatttcatcttcttttatgttcttaacattttcattatcttgtcttaggctcgcatttatgaaggaaaggaaccaattcaattcttcgtgattatgcaaagctttatcgttttcaaggtatggagaaaaataagttcgttatgcagttttgttttatcatccatgctctcttagtctcttatatgagtatataacaatatctgctgtttttgttttctgatggaaccgatctgttgatttttcacagggtggtattagcagtggatacaagaaatacatagccgagaaagaagttgatgatgatacatacaatgagaatggtgttgctctattccgaattc

SEQ ID NO: 647 - DNA, 87635 bp, Arabidopsis thaliana
gaattctttaacgccgtccacttgacggagaacgttacctacgatagaaacctccgatgaacagcagattccaacgacgtcgaagtaacttgtctgtaaattcatcttctttgactcttcaccttccgccatcgttgagcttgagatctcggactaaatttcgaggagatacttttacgggatgatgtcggagggaaattaattatttggtttaggcttacattattatttataacatttgaaattttcagtctctataaggaatgttatattaattgctccacgattttttactatttccaaatgtcaatgctgagattggatacgcatttaaattttattttattaaccatgtaatttttgaaagatttacatttatttaatagaaataaatattaataaacaacaattaattagtcaattatagtagattcgattttattattgaaaaaaaacacttcaaaacctatatagttttccagatgttaaagaaaaaacctatatagttgatatattaaaatcttttttagcaaataatatttgagcagatagaatctaacaaattcttctaaatcaaattcagattttgttattaaagaaagagaaaagagcctattgggccataacatgggttcatacaattctcaatcagataacttccgaggccttataatgacttgtaatataaatggcaatttcgtgattaagtgagtatgaaagggtagacatgacaaaacctaactacagtaccgaggtagccaataatttatcttggctggggccatactctgaccgcagtttccattaatttacagaaatacccacgcttgggatatatatgtatatgtaaccataagtgtaacattttattagttttcagtcgttttccaaatttatgaatccatttacatgagacaaaccaaatccttgttggtaggtccatcctttacactattagaactgaatcatttttatttttctttcacaagaatagaatatttgtcgtaagcaaagaaacaaaagtaaggttaaaaattagtaaaacaacaaagggttgcatgtaacacaaggtttagaaggaataaaataaacaaaagttatgttagtaacgtctttagttaaaaaaaaagtttcatagatgaataaaacaaacaaaattgcatgtcccacgcagctataaaataagaaaaaaaaaaattgcatgtcctaacgccacctaataataaataaagtgaaataataagacaaaccaaaacaccattgactcattgagactgatgtcaaaaaatgagaaaaaaccaatcacattgagagttgagattttaaccaatgcaaggacaatggcaaaaccgaaaataaacgtaaaaatcgaggttgataataacataactcataaaatccgtattttcatggtgtcttcttcttcttcttcaccttcttcactcatcactactcacaaatatatttttgaccgttgttcactctcaccttcttcacacgctccacatcttcttctgattgacctttaacacctgaaaggttttgtcttctctctctatcgtccaaaaatctaaacttttctggttttattttatagatttgggtccctcagtttgtttattttacctttatttatgaacaaatgtgcaaagggtttagattttagctccttgaaggctcataacgcataaagttcttggcttcatcgttttctctcttgattaatttggcattgtatatcttatgtctgattgtgtgaaaaaaccacaaatgaaaggagtttagacacaaatcacagtttaagacaaaattatagtcttgtttctttcaaattatgcaaaaaaatcaagaatctgagacataagagaaacgtttatgtctctctcttttaatcaatgctatgttgcttttctcaactgtttcaagcgttattacattactagctaaaaatcttgatgtcttgttcttatttttgcagtttctcctcttgagctttggaattgaagctaagataagaaatttagagagaaatgggatgttctcattcgaagtttgatgacgatgaagctgttcagatctgtaaagataggaaacgtttcatcaaacaagcagtggaacataggactgggtttgcttctggtcacattgcttatatccagtctctgaggaaggtttcagatgctctccgggaatatatcgaaggagatgagccacatgagttcatgttggacacatgtgtcactccagtgaagagaatgagcagctcaggcggcttcattgagatatctcctccttcaaaaatggttcagagtgaggcagagtcgaaattgaatgtcaacagttacttgatggctagtggaagcagaccggttcgggttgaagaaaagcctcctagatcacctgagacttttcaggttgagacttatggagcagatagtttctttgggatgaacatgaacatgaacagtccgggactaggcagtcacaatataccgcctccttcaccacagaactctcaatgggatttcttttggaatccattctcggcattggatcagtatggatacagttatgataaccaaaatggtatggatgatgatatgagacggctgaggcgggttcgggaagaagaagggattccagatcttgaagaagatgaatatgtaaagtttgaggatcatcataacatgaaagcaacagaagattttaatggaggtaaaatgtatcaagaagataaagtagaacatgttaatgaggagttcacggacagtggatgcaagattgagaatgagagcgacaagaactgcaatggaactcaagaacggcgcagtcttgaggtgtccagaggaggaactacagggcatgttgttggagttacatcagatgatggaaaaggagagacacctggtttcactgtgtacttgaatagaaggccaacaagcatggcagaagttattaaagatcttgaagatcagtttgcgatcatatgtaccgctggtaaagaagtctcgggtctgttggaagctagtcgagttcaatacacatcctctaatgaactgagtggtaagatttgtacttttctttgtttctgactatatatatgaaacgaatgtggttctgagacttcttattgcagccatgacaatgctgaacccagtagctttgttccgctcaggcggctcatcgagatcttcttcctcatcaagattcttgatcagctcttctggaggttcaagggcgagtgaattcgaaagcagcagcgaattttcggaagaatcttgtatgctctcgggtagccatcaatcaacattggaccgactatacgcgtgggagaagaaactctatgatgaagtcaaggtaataactgagacttctaatagtattttcagttcacctctctctggttaactgacttgaatgttgtgacagtctggagaccgaatacggattgcatatgaaaagaaatgtttggtgctgaggaatcaggatgtgaaaggagctgactcttcggcagttgataaaacaagagctacaataagagatctacatactcagatcaaggtctctatacactcaatagagtctatttccgaaaggatcgagactcttcgcgaccaagaactgcttccacagcttcttgagcttgttcaagggtatgccaaaacatctttcttgtttcctgaaaacatatgtttctctttgactgacaatggcattttacagattagctcagatgtggaaagtgatggcagagtgtcaccagatacagaagcgaacattggacgaagccaaactattacttgcaaccacaccttctaaccgtcacaagaagcaacaacagacttcactaccagagatcaactctcaaagattagctcgatcagcattgcatcttgtggttcagcttcgaaactggagagcctgcttccaagcatggatcacatcacaaagatcctacatactctctttaaccgggtggttactcagatgtttcagatgtgaccctgacccagagaaagtcacattaacgtcttgtcctcacccaatttatgaagtctgcatccaatggtcaaggctactcaacggattaaacgagaagccagtactagacaaactcgacttctttgcctcagggatgggtgcaatctatgctcggcaactaaaggaagacacgtctccggtaacagattcttcgaggaagtactcaagaccagagagcatggagcttgttgaagctgagaaagtggaagaagagaagataatgactgcagagaaactagctgagattgcagttaaagtactctgccatggaatgtcagttgcagtgagctcactcgccgagttctccattagctcagccgatgaacactcgaagctagttacccatcgagaggaggacatgccagagcaaaccaagatttaaacttttctattctcaacttctcatttatttatttatatatccttagaagattaggactttaggttagattagccatggaagctgcatcatctactatcaaaagatagtttagatggatggagatttgtgtaatattaagacacataaagttagttcagttagacttctaatttgggattttggtcataaacttatctttatagaaccaaattcattacaccgtgtcttatagtcagaatctttatcaaaacctgtctcttctaaactaaatagttgcagaacaaacacaaaaagatgaatctttagaaagaatcttgatggtttcttgaactcaagctaacataaagatcgatgacaaacctgaatcaattagtgaaagtgtaattaagaacaatggaaagtgagcttatctcttgatcgtctctcttccatgatcggtcactgtaagctcgaattcgatcggagtttcgagaaaagatcagttggatcgggtttgactttttgacatttggatacaattaaagcctttttgtttatttgccatcctatttgggctttgacaaggcccaaatcaactttgtatatagaatcggcaagaaaatactgattttcttatatattgttgatcaatatgttaccatccttaatttcacttcttttgatcaatccgttttattcattattcagtctatctgatatattattccatcattattacatatgtgtctgatatatggtttcaatctagacgaaaccaagttttaaataaagggactatgccattttaacaatggaatagagccctaattttaattcactaactgggatatgttgaacggactagctataggtccgttaaacgctgcgttagccaccacagtatttatcacttccgtagtatgcacgttatcccagaatatgaatttgtttctgtctggacaaaccggtccgttcgccgcacaaagttcttcacccggattaaccgtacagcaactcctatcaccaaccgtaatccctacaatatttcaaatgaacaaattagtgtcggtaacaatttcatcgtttttcttctaagtataaaattacctagagcggcgaaatcttcagcatttccagagaagagatcaacataagtgaacatagctcccggtttgttgttgaaatctgtgactagggctttgagtttagtgttgaagatgatcacggcttggttcacttcttctgcgcagccagtgccgccaccgagggtagcaacaatccgtggtgtacatccgatcttaccgataccgaacaacgctacattcctcgctcctagtacgtacaattgctacacattgtcacatacaaaaacatatcaatgttaagatatcccacatatagaaaatgttgctctatatattctagataaacgaatgcatgtatgccataatcatataatgatctaatacttaccgtcagatagatacggtagaggcttatgagagatcgagcgtactggtcaggattaaatagacgacgagctagagtaggaggcgacaagaagtagttgttgaggtaatcgttgcttccgatgttgattgtgtatagacattgccttaaccgactcagtggcaccgccgcggttatgatagcggaaaagtggttgtttacttgctgtctcaaactgattctctcaccctatttatatgttcaagattttaggtttttttaaagtattatatatatttatttatcgtagggttgttaccatattttcgctggtttcttcgcggataccgccggcaccggaagcatagttgagtccgatgttagcttgtgcctgtgatgctccggcaaatggtggaattgggttattgaaacccgctagttcagctaaaagtaaaaatagttcaactttgttaaatatatgaactattaaataaataataatgagacaagacgcttgaattaatattaatctgataactttgaattttcttttaaaatatatttttattagtattgttgaactccacaacaatgaattttcattccaaatataattatactcttttaataccaaagtatatgtttgttttggatcggattcaagtatactaaaatatatgattaatgtaattaagtttgactgaaattttaggaattcttctcaaagttttggaaatgtttagaattttaagattttggtggtgattttagaaagaaaatataaaatgctgtattttctaaccttgaatacttttttgaaaaaaaaaaaaagaagttcatccatatccaagtgatgttagaaaagaaaatttaaaatgctgtattttctaaagttaaccttcacttctttttttgaaaaaaataaattcatgcatatacagtttaaacattatggacaactgtctttataatttttttctgtaagaacccgatcatggtcggctatatgacaatcgaataacgtaagaaaaaatggattcagctaattaaatcaagaaaaccggattgaaaacttaccgataacgtctggaatattccgaccgttgctaaaccgaccggttggaccttgaaagtaatctataccataaggtaaatagttgaccttggccttggtgttcaaggcattgttgttaccgttgtcgaagacagagtctccaaacacgaagtaacacggcgtttgctgtccatgcaccgctggtgccaccgccgcgactgcaaacacggtggccaaaataatccacaatgccttggactctccctcgaccatttttcgcaaatcgaattatacgaaaaatgaggagagaagaaaaagcttgatgagagaagaagaaaagtgggcttattgtattatatggactagatttgtaagtctgatggttagaggggattttgcttagacaagtagaaaattatgcgactatatataggatgaggcagtgagtgaatcaagggagacttggagaactatataaattgttttgcatgaattaagaggtttttcttttaatattatttatttgaggtggacgtgttggtaatattattattttttgttaagctgaagaattgtcatgtaatttacttatgtttactaaaatatatgttacaaaatacacataggttgtttttttccaaagcatacaaataggtagagaaagctttatatatatatatatatatatatatatatatatatatatatatattatttaaggtggacgtgttggtaatatatatgacggctgtaaaattttatttgtaagaaaaatatgaaaaaggtataattaataaaccatagacaaaatctttcaaaaccaaacaagtgcataacgatcccatgcaaaaagtttggttaagaattaggatatgccagattccaccaaatgcaaatgaaacctaaccatacatgctttcaatgacatcttcaaaatgatccacaaatagtttatcgttctctgcatccactaataatttttccttcactcccaataagatattgtagtgaaattactaacttgaaaatatacttgggctaaaattcaagtttgtaaatgtatcacatattttcttaacaatatgaaatcatcaaaattaaatataatatatcaaaattcgttatagtttatctctcaacatcgtaattgtagtgtatatagatgtttattttgcaacaaagttatacaagtttaccgttgaacaaagatatgtatatacattgtggccgtgtaagatttaaaagaaaaacaaaaagaagttagttaattggttaattagaaaaagggctacaaatgccgtattgagaaggttataccgtatactcaacatatgtttaattatttgactatatacaaattaaatttgaaatccgtgtctaatacggatcaataagtcaatgtctttcattattcggtaaaataataaaaacagatttgttttgaacgagttggccactttctagtaaccataatacgatatgccttttttttgggtcaacttgtaactataaactttgatagacgacttttcatattgtcttattgatgatgtaactagttctttatatttagagatggaccagatgatattacataataggtaatgtagaaacatgtattatcgaaaatatattatatgtaagtccccaaaacaatgataatatgatataataactaaccattatccaattttaacactcaaccatttataatttgttgaccaatgataacacacaagaccttttattgaggtaactgtaataatttcattttttgggggtcaaatgttataagtctaacaagagtgtttcttacaaaaagtctttacagtgttaattatccaaacaccatactaaataaactcaagttgatcacatttttaacatgttaacatctttgtagatatgaaataagagttgacttttgaaaagagtttatcaataacaatgttacttctgaactttcatcacttgtaatggcccaatgggcttttttcaatgaatccattaatagacaaaaaccaaaaaaaaaaaaaaaaagtcgccgtcgatttgtttatcaccgactcaaccaccggtagggtttaaggtttctcatacactctccttctattgccgccgtaataatcaaatcaatcttcttcttctcctctaacccaattttggaacttgaaagatgttgaaaaggaagcttacgagtccgaagaaatctaagccgtcgaagaagacgaagaagaactctaaaacccaattcgatgattctccagtagaggtcgtagaaaccaaagctgaagagcttccgcgtacgggttcgaagaaatcgaatccgtcgaagaagagaaagcagacgaagaagaattctgaaactcaatttgaagattcttcagtagaggtcgtagaaaccaaagcttgtgaccaggaggaaacggttacggacattgttgttgaagagggtccatggaagaaccttgaactcatactttcgttgcagagcaatacattgggctttaaaaagtaagctctttgctttacttgacgatgttactgtttatgtttgctaaagcttgtgactttggagaacataagcaaaaagtaccaaaaatgttgctgatatgtttgttgtttatgaaaggtacaatttttattgaataattaaaggaatatgatttgcaggaaggtggagttggcttttagttttgttaaaggttatggaggagaaaatgggactaatgaggatgaagaatgtcaagcggttaagatatcgcggctgattatatttctcagcgactggatccagtctcttttgattccttcagagaagaatattaaagttaagtgtgatttagattctgaaccatgtttggacttcaggtgttgggagatcttcagtttctgcttgaaggaggcgacaatcttgggagtctctttaaatttgtcaagaaacctattaaaggctattgggcttatcacgggaagatttttatctgccctgaacgaatccttggctacgggggttgatttctgcaatggtcaaggttttgtagtttacagttctgtggttgattgtctcggcttgttattttcatcgaaaagtggcatgtctaatgacaatttagacttgtggttttcgactgttgaaccagttctgaagctcacacatacggttcttgtagagaatatcaaggatagtcttggtgacagacatgtccttaaattctcttgcttggttcttgagccattctctaggttcttaatgactcatccaactacgaagaatgggttttgtgattttctggacaagctttttgagccatttatggatgtgttgggtttattaaatctcatcgaggacaaaaacaaggatttggagatatccttgctgaggttgattgaagacatattatctctggctctgtttcattcagctcatattgatgggttcttaggcctgggtggagcgaaaaagtatttaccagaatcgaaagagaacaaaactattctgaaaagctatcatcggcatttttttaccaagttcaaaaatatgctattaatgaagaaggagttggagctgagctgtatggggtcattgtttaaagtgtttatttacagagtgatgaaacaacaaagagatcctaatcagttgcaggaaggcatgatgacaaaggcctcaaatgcgaggcaagcagaagaaaggccatggaagctggcggacacagctacaaatgataatgggtcttctacaaaaagtcattactcaagttccctccggctggagacacgaaaatcaatttttgatttcttcctgcatcttatggaacctatattacttgagatcaatggatataatcagtctggctctgaaatggctcctttattgggtgatttttgttgtgttattaagtcagcaaatagtttgctgttcaactttgctcatgagcgaatgtatgtgaagacagaagatgcatctgaaggagcttgctcttgttttttgaggacgatcttcaaaacaatagtttcagttgcttctgaattaaagaaacattgtccatatgataatgggtcagagatgcatgttttgttagccaaggagctagtaaccgcaataggctatctgttacatattgaatacgaaatcattgagagtgatttagttactttgtggctaatcattctctctttcctggagtttagtagtttgtcaccagagaattcagaaggggactgcccgttgacttcattgttagttggccttggatgccagctgataactttatatagtgaccttcgccaggtttgtcaaaaatttattccttttcagtggttgcgttttctgccttgctagtatctgttatgttcttattttccttctgaagaatgctaatttgttccccggatgatgtaggtaagtgttgctgtattttctctgttcaaagctgtaaggcttgtgatgcctgttgtgacacctgctgatggtgatgatgatgagatgattgccactgaagagcttccactatcaactgtgttccctttccgtttagagagaagtgaaaaatcagtggaaaagctcttgtcatctcaagctttaagacttgctatacataaagctattaaagtgataccagaaggccaagcaagtggttgtatcaagagcttgactgcagatgtatcaaaaaccatgaaatggataaaacaagtttgttgctcaacaggtgctacagaacaagatggacaggtggcagcattcttggctggatctttgtctgatatttattcactaattctcgactcaataactattacaacagggaatagtaaccttgttggccagtccatgaaagatctgttggatctcatcagtccttgcttaacccacctggtttcttcagactccgattgcatcgaaaatttcctttctgctctcaccggaaaagatttggagattgtgatggctgaaaagaagatagagacctacagaaagtctgtgcgcttgtttgttatattcgtcttgcgtatttacatgtcttccagaagcttatataggcaggtgattagtcttatgcctccgaaaaaaacaaaggatatggctggtattaagggcgactctgttgcagttcgttgcggaagcgattggataaaagagaaaagttggaattatgaaggatatttttcatggatctcccaaccttctgcttccattgttgacactattaaacacatttcagctttttaccttaaggatgacagtgcagattgctccttgctgatatatatattgtatggagtcgctcttcagagacttgttgatttaaacagccacataaaatcacttgattatgtgtcacagataagtgataatcagataaatgatacaatgctcaagcatgtatcagttcttaagcgtgaaggagaagagcttactgatttccttttaggcaacaacatcatatcaggttttgttgatgatggaacatttgagacgataaaagacactgatcagtgggttcttagggtttctggcatcaacgggaagtgtttgcctactatgcgtttgtgggttcttagccagcatattgatctttggtgcccccatgcaggaaaaaagaaattgaagaatttcctgtctcagctaataggtagttccgttccttgtatattgaacggagtgggtatgtctactcttggctgggaaaataatgtagacaagggctctcaaaagaagaaaatagggttggaacagttctcgtttggacttctatttgattcagtactgtatgaacacgaagtaagtcatctttcattgtgcgaagttccaattccatatttactttgtttctttaagcgctatatccagacattcatttgagtttttcgacaactagtttgttcgcaggtatttggccccgagtttttctcacgtactgaaaatgacagcagaaacgtttttcaaggatattactgaagaagtaaactttgattctccatcagattggtcagaggtgttaattttgcttgaaagttcaattgctaacttatctggaaagcttaaatcagaagcctttctagaggcacatgtgtcactgctggacaatcggaagttcacagcttgccaaaatttgctaaatctgttaggtgtgatgcccaaggagtatacgaataagaagtcgttccaactttatgcaagttatgttctcgaccttgagaggtaaatgatagtatatagcatatacctttcttgtatgtttgctgcagtaaagcatgtcaataatccttaaaaatttcattggcaaacattttaacaaatattacttttgtcatcatctcttgtaggtttatagtttttagcatgttgagatgtttgaacaagctgtcctgtggtgatatgcaaaaccttttcagccttttcagtacttgcagaaaaactttgaaaagtattgctatgatttcttgcgacaaggtactaggagctaccaagttgcctttatctgatagttcgttgttggcttcttggctttttaaatcagcacaagctgcgacttgtcaagtgagatttaggaatgatgttacaggaaaagcaagggacgccctcttttctttgatggatcacacatcgtatatgtttctaaccgtaagtaaatatcaatttagcaaggcactaccattttctgatgaaaaactcatttcatcagaaatttctgagggaactggacaagcgaaccttataattgagaacttgacagaacaggcagaaactctactaaatgctttgagggctaccttcagagatgagaaaacagcctttaaatgtgagagtctgatactgaacaagttaacacctatattttcttgttttagtgggttgttgtggggattagcatctgcagtgagtaacagagatatgcagaagaatcatcagaacgcaaaactgagatggaaatcagaacagttctcaaagctttcccgcattatccatgtgcttagcaattttttcgaggtttttgcacagtgtctgtttcttagtggtgatgtgcagcgagaaatccaaaccaatatcaactggaccagattgcttgatgggaccgagggttcaaatggtcttgtgtgtggtgacgtagtagagactagtgatgtgaaaaagaaaattattgagagcttgataaagggtgattcttcagaagtagtattggcactcaagcatctgttaattgcttctgctgctattttaaggttaaacctgcaaattgatggcattacattctcacctacatttgtctctgttctcacgaacatttcgaatgatttactgtctgtattcgctgacatgagcgaggcaccacttgaattctcatttatttggttggatggtgcagttaaagttgtagaagaactagggagccaattctgcttatctaaccctacattaaacatagatctgtactcaaagttgattgagttgcacctgaaggtgattgggaaatgcatatcactacaaggaaaagaggctaccttggaatctcatgagacaggatttggtactaatgcaatccatgctaagctagtgctaacagaaaaaaaacggtctcacagattgcattggttggacgaattaaaacagaggcttaggatgtcatttaaagtgtttatacatagttcctcagagctacacttattgtcaggagtacaagctatagaaagagcactggttggagtatgggaagtgtgcccagctatctattgcatacagactggaaatagagatggaggcagaatttctgaaaccgtcgctgctggtcttgactgtctggacctaattctggaacatgccacaggtaaaaattgttttctaaaaggcaatcttagtaaagttgatgttaaaagttgtaacagtgaacttacagtaatgaaacgaatctagttactatttttttctgaaacacattgggaacccaaattttgatgtttttgctgaagttatcattattgcctatttgactgaatagtactattgttttgtaggtcgcaaacgtttgaatgtggttaaaaggcacattcaaggcttaatgtctgcagtgtttggtataatggctcacatgcagagtccatttattttcttctcaaatgcagtcgttggcaaccagggttccaattctccagattctggggcagtcattctcatgtgtgttggagtcttgataagaatagcagggaaacacgctttgtttcggatggattcatcccacgtaagtcaatccatacatatacccggagcaatttttcttgattacctccacgcaacaagggtgggattctcggttttggatggaaatctgttatctaaggatgatcagcaacaagatcttttaggatgctcaaaagaacttcaagtagacaggaaattctcagtgagcctgtatgctgcttgctgccgactactatatacagctgttaagcatcataagaggtaagtagaattttattttgcttacacacaaagtcctgttaaattttaccatcttagaactgcgtctaattttgttcttgctgtgacatatcaacatctagtcaaactgaggggtccattgctacactccaagaatctgtttccgcgcttcttcattgtctggagacagcaggaaaaaatttgggtaattgtgtttcatgggaagtggaagagggaattagatgtgcttgtttcctccggaggatctatgaagaggtacgtcaatgaaaataccctttcttccttttgtgtttgagaatgcaaaactatttcagttttaccgatattgtggactaagaagctgtcaactaagtttacatattcgtttcaacggaaattgcaattaagatcggatgtcttaatgattctacaactagctgtgtctcatttttgcttataaaacaactggattgcagctaagacagcagaaggaggtctttggacagcattgtttcaagttcttgtcaacttacatatgggtttcttccggatatggacctcttaagacgggtcttgaaaggtaacattcttctcccatttatgtctctcttcatacattttcccttctcgtaagaacgttcatcagaaaagagactatgaactactactaactgcaaatatggcttaatggtgtttgtccttaagttttactagccaccaaaataagtaaatacgaattaattgatttttgcaacttttgcagggaggtagatgaagctttaaggcctggtgtgtatgctcttatagactcttgctcacctaacgatcttcaatatctccatacagtatttggtggtaaataaataccctttttacttgcaacatcttatttttttgttttttttaatgttccaattttagaatcggtttttgtacataatttgttcgtccccttctttctttgttcttctgcagaaggtccttgtagaaactccctagcaactctgcaacaagactacaagttgaatttcaagtatggaggaaaagtctagaaaacttgcgattacttttctacctctcatgttgcggctgagtctttgggggtggggacaatgggtgttgctctcttgttgaatttgtaaagttgggcattctctaagaccagagaattgtcacttttgttcttattgtgttcctttgtgaaagtacaataaaatgcaaaccacgtaaccatgtgtttttgcctaatatagtaatatgattaagattttgtttcacaaaactattgtttatcttctaaaccaaaatatatactatatgctaatctgcctctattaaataaaaaataaataaactgcgcaataaaagaaaaaaaatcttagatattttagactatttaatttgggcaataaatgttttaggatttttaagaatgaaggatcgtttgtggtagactcttgcctttgtgttgtttttgtttttgttttgaagatggtaatggtatgtcaagtgagaaaatagttaggcatgggcataatacccagaatcgaatacccgaaccgaaaaacccgaaaaataaccgaaccgaatccgaacctaatttttagaattacccgaatgggttctaaacttcactacccaaaaaaacccgaaccgaatctaatacccgtgggtacccgaatacaaatataaacttaaaaatattacttatatatatatttgtaatacctcaaacacccaaaattaaaattataaatccgaatatattagatattttttgtaattcatatacatttggatatatttaggattaaagtaaccaatgttatagttttcttttagataatttaagtattttggttacatttggttatatttggataaaaagtaatcaatatatttacgggtaatcgggtatttcgggtagatttgggtatatatgagtaaaaaacccgaacctaacccgaacctgaaaatattttggttatttttggttatttttacatttttactaaaataaccgaaccgatccgaacccgaaccgaaaccgaaccgaattttaaaaatatccgaatggttctcaacctcctacccgaatagacccgatacccaaaaaaaatgaaccgaacccgaatgggtacccgaatgcctacgcctaaaaattgtaatcgataaataagacatgatttaacgctaactagagaaatatgtatattgattcttgtctctttttttttttcacaatactgattcttgtctgccactaaacaatcacactctttgctaggaatttaaataattatattttattttaaaaaaaagaaattcccaatgattgtcaaagctttgataggccacagtatcttgcctattcacggcggctccgaccatcagtttccacggtgccggcggctatatacgatagtcgttgtgaagaaaaaggtccttttcgtcaaatcattttacattggagccgaaagtgtgtactttactttggtcggtttttgatattttatcattactttattctgaaaataaaattaagtttgatgtattcatttcttgagactttaaagacaatagtagaatatatattctccttgttataaatatgattgggtgacatggtacgaccgcgatataaattctatatatatcatcaactctgatattaagaaaaattacgataaaacgaaaggatataaaaaaatagtcaaactttagcgatataacaaaaattattgattgtacaaagttttgtattgctgtcatattagaccgtaaaattttatgacgatcccaattcccaaccctaaactaacaccacaattattgagcacattcaaatgctgtcatttttattactcgtacgtacacatgaataaggtggaaatgtcatatttgggaaaacaccataaaacaatatgtatgtcgttcactttggtctcatataaacgctagccaaatcatacagaggtaatggtaatgtttttttatcgacggcaacgaaagtttatgctaatatgtttataaattacttttattgattaatatgattatctctgtatagttgtggacgtgtgtatataactgaccgtctaattaaagaaaaatttatcacatcacgtacctaaaagacgttcttcattaatccataattgctttagtgtataactaatcatctatttagaagttttttgttttacttttcctattgttaatgtttgaaagattagaatatatttataagaagaaatttataactttttagcaaaaaaaaaaaaaaaaaacttataacttatgaagtctttggtatgtatattaaatttgacctgatcacaagtaatgcacgtatattcacgatttgaggtacgaagcagatgaaaattgtactatttaacaaaattactaaactataccaattaccagacacataaaatctagataaagtggtcctaatttctgagaaagaatattcctgtgttcgttctttctatctctttccttttctgttgttacatttcccacacacaaaaaaaaaaaaaatctatttactgatctatgttaaataaaaatcaaaaggaaattgttttatgatttttattactttatattaatttaattgatgtaataaattattaaattaattcttggaaaattaatcaaattaacttaaatcaaacaaaatttagttaaactaataaacactttaaaataaaaagtttaatttgattaatttagtcagttatttattaaactaataaacactttaaaacaaatttagttaaactaataaacacttcagttaattattaaatatttatgagaattctaaaagattaatccttatgaaacagaggaaatatattttaagatagaaaagagatattaagaaatctcaaattaaaatacaactcatatttgacacccataagcaaaagatattataatactaaactacttatcaaagatatttcagtttattgatatgatcagaatttggtcaatttttctgtcaacaaagattggtctaaattaatgacctaaggaagcgaattaattcattaagaagactttttttctttctcaaaacttatgaaaattaacccacttctaattaatcatcaaaaagcttgaaattatttgtaaacgaagactagaaagagagaggggaaaaaggtatgacaaacagccttaaagttaaaggtaatagtaccttttgtttgttcttctttttttgcaaacaattttttcccttatttaattacgtttataaaccttaattcagattccttaaatacattgttaggactccataattagtaacggcattaggagcataaacaaaaattatgataaaagttttgatattatggaaataaccaaatatcttacctgtaaataaaataaagagatgtgaccaaatttaattgtggatttaattacattatctaacccttgaagaaactcaatgttttttgtgggattgttgtcctaaacctgaggttacatgtaatcaaaacattaatgggatttgaagtaaataaattagatttgcgccaaaaaaacaaaatctccattgattacagtgttttaatatggtcagataaaaccacagaagtggtaacgacataaaaaatcaccaccaaacataaaaccgtaagaaaagtttcgatttttattttctgcgatccaaaggtctagtgatgaattgaatttggtttttgtttttataattgaagaatgaagaaataaacagttgatgggttcttcgcttcttctcttgttgggttagtgataagcacgcctggcttctcatcattccctccaacctttctctctctaaaagacttcaattgttttatcagcttctctctctaaataaagctctcaattcaattctctctctttcacttttttttcctctgcttgcttcttctgttcatctttttgcttcgtcaaaattttgaccaaagttttgtacttttttgttgctgcaatttttgtgattagattggatctgggcttggagctgaatagcggatttgtataaggtaattgcttgaaacgtaccgaattgattcgtttttttgtttctctgagatttttcaatatctgggtcttagagtttggctgatctgattggttctctgagattttcatgtagataagtttgttttaaaagccaaagccttagtttttaattagtgagatagatttatgtagagagcatcaatgatcaatccttgagctttatcttgggttttgttatgttgtttattgaaaaatggtttgttcggtgagtatgatgattatgttcaatggaaatgttcttccttttctctcgaatttctgagttttgctttggtttcatataactttgtttgtttgtctggggaattgtgaaatttacataaccactacttccgatgtaatataaatatcagagcttttctttattgacagagattttttgacttgagatgaatgatgttgacccttgtggattctgagttgatttttgattctttctaattggtttctggtttctatttctattgatcagctgaatccaatcatggtcttttcagtagtgtatgctattggtgaaaatcaatattggtttcttcgccttgcttgtgatgccttgtctgctatcaaaatgtgtcatttgattggtttttgatagaattgatttgcatttgttgattcttgagattttaatcttagttgatgttgtctcataggttattattagtcttctctatcgttgcggcgttcataagttggagaaagtggtaaagactgcttaagtatgtctgtttctatgagagatttagatccagctttccaaggagctggacagaaagcgtatcctttaactttgattctctcatattgtttaagactcctatagtaaagctgctatgtttgaaatatctacatgatgttctccttgactataagttagtggtattgagatatggcgtatagagaatttcatccctaccccaattccaaaatcttctattgggaagtttttcaccggagattcttacatagtattgaaggtaaataaggcctagtcacaagttcttttttgtttccttattgccattttactcgggctttctgctgatcgatcttttgtgaccagacaacggcgttaaaaactggtgcattgcgccatgatatccattactggcttggtaaagatacctctcaggtaagaccctgttattatttcctttctttttttactttcgtagaatgacggagaagtttgagagaaactgatgatttttctcaaaaacaactaggatgaagccggtactgctgcagttaagacagttgaattagatgctgctctaggaggtcgtgcagtgcagtatcgggaagttcaaggccacgagactgagaaattcttgtcttattttaagccatgtatcattcctcaagaaggtggagtagcatcaggattcaagcatgtcgtagctgaagaacatattacccgcttgttcgtctgcagaggaaaacatgttgtccatgtcaaagaggcaagtcacatttcacttctttggttctttcatctcactttgtagtcatactctaacggtctaaattgattacaggttccttttgctcggagttcattaaaccatgacgatatttacattcttgacacaaagtccaagattttccaattcaatggatccaattctagtatccaagagagagcaaaagcactggaagtggttcagtacatcaaagatacttaccatgatgggacatgtgaagttgctacagttggttagtgagctgagcggttggattagggactagtatctctatcatctctttgctttggtctctaactgcgtatgtttcaattgcagaggatgggaaacttatggctgatgctgatagtggagaattttggggtttctttggtgggtttgctccgctacctaggaaaacagctaatgatgaagacaaaacttataattcagatatcaccagattattttggtagcttcttctcgtcataatacatatattttgtgccataatgcctcaaatgaacactattttctttactgaatttgtagtgtcgagaagggacaggcaaatcctgttgaaggcgatacattgaagagggagatgctggatacaaacaagtgttacattcttgattgtggaattgaagtgtttgtttggatgggaagaaccacttctcttgatgatagaaaaattgcgagtaaagcagcagaagtaagttttttcaaaaaaaatcgaaagaaagtctgaataattttgttgtatgccataatgtttgctgatgttagtagagccatacaggaaatgatccgttcatctgaacgaccgaaatcgcaaatgatccgcataatagaagggtttgaaacagtaccattccgatcaaagtttgaatcttggactcaagaaactaatacaaccgtgtcagaagatggtagaggcagagttgctggtccgtattactgaactcaaaattggatgatgattttaaatacgtacaggtagctgaaggttatcgtggtttttcttttgtcatttgttgagcagctcttttgcaacgacaaggagtaaatgtcagaggcctgatgaaagctgctccgcctaaagaagagcctcaggttttcatcgactgcacgggaaatctgcaggtttggcgtgtgaatggtcaggcaaagactctccttcaagctgctgatcattcaaaattctacagtggagattgctatgttttccagtattcttatcccggagaagaaaaagaagaagttcttataggaacgtggtttggcaaacaaagtgtggaggtaacagaagcaaattcttatatgattgtgtcacatagattctgtggatgtgtatgctgaagcagaacttgcaagtaggttcttaattgtcaatttgtggtcatgtgtaggaagaaagaggttctgcagtctctatggcaagcaaaatggttgagtcaatgaaatttgtcccagcccaagtaatattcttctgcattcattcaaaaactctatgctgttggatttcatcttcttttatgttcttaacattttcattatcttgtcttaggctcgcatttatgaaggaaaggaaccaattcaattcttcgtgattatgcaaagctttatcgttttcaaggtatggagaaaaataagttcgttatgcagttttgttttatcatccatgctctcttagtctcttatatgagtatataacaatatctgctgtttttgttttctgatggaaccgatctgttgatttttcacagggtggtattagcagtggatacaagaaatacatagccgagaaagaagttgatgatgatacatacaatgagaatggtgttgctctattccgaattcaagggtctggtccggaaaatatgcaagctatacaagttgacccggtatatgtcaattttcacatttcttcattgtttagtactgtagaatcttcctggctctaatattttgtctatttacttcaacaggttgctgcatcactgaactcctcgtactattacatactacataatgattcttccgtctttacttgggctggaaatttatcaaccgcaactgaccaagaactggcggaaaggcagctagatctgattaaggtaatataagtttcaccttaatctctataaggataagtcaatgtgtcaatcataattagtaaaaaggaagtataagactcgtagctatgttttaagtgactaagcagcatctattacattttttttcttcagccaaatcaacaatctagagcacaaaaggaaggttcagaatcagaacagttctgggagttattaggaggcaaagctgaatattcgagccaaaagctcacaaaggaacccgagcgtgaccctcacttgttctcttgtacattcacaaaaggtacaaatgatcatattttttcccataaagtttaagcctaagatgataaatgcacacaatgactgtttttttttcttctctccattgctgaaacgcaaattaatccagaagttctcaaggtgcgtatacttttaaaatctttttttgtcacaaaagatttatgcaatcataatggaaaagttttgggaatgtagctcaatccccatttttttgttttcttgtggtcttttggcaggtgacagagatatataactttacacaggatgacttgatgaccgaagatatatttatcatagactgtcactcagaaatctttgtctgggttggccaagaagtagtcccaaagaacaagttactagctttaactattggagaggtcagatatagtagatacattgcatactaaaccatgccttaactctagaaaaaaatagtctcaaaagatcctgaaatttttaagcaagtttctcatttatataccttttgtttccttagaaattcatcgagaaagattctctcctggagaagttatcccctgaagcccctatttatgtgatcatggaaggcggtgagccgtcattcttcacccggttcttcacttcttgggattcctcaaaatccgctgtaagtacctaacaaaatcaatcggtttctctgagaaataggcacgaaaggaacccctaacaaagggttaaacactctttttttttttgtttacagatgcatggaaactcattccaaagaaaacttaaaattgtcaaaaatggtggaactccagtggcagatgtaaggactattcttcctttaccttttgattgatgattcttcagagtgtgcattttaaaatttgtttgttaattgttctcttttgttgtgcatttgttaattagaaaccaaaacgaagaactccagcttcatatggtggccgtgccagcgttcctgacaagtcgcagcagcggtcaagaagcatgtcatttagtccagacagggttcgcgtgaggggcagatctccggcgttcaatgcactcgcagcaacatttgagagccaaaatgcaagaaacctgtcaactcctcccccagtagttaggaaactctacccaagatctgttactcctgactcctcaaagtttgctcccgctcccaagtcttcagccatcgcttctcgaagtgcacttttcgaaaaaatacctccacaagaaccttcaattccaaaaccagtcaaaggtatattttctgaataaattatctgaaagtgtgaatagttatcatcttttttaaggattcacattttcgcagagtgatcatctgaaagtttcaatcctttttgcatcttggtttagagattcacctgtcttattttactttcaatattgatctttcttattttaattggacatgaagcgagcccgaagacacctgagtctccagcgccagaatccaattcaaaagaacaagaagagaaaaaggaaaatgacaaggaggagggatcaatgagcagccggatagaatctcttacgattcaagaagatgctaaagaaggagtcgaagacgaggaagatttaccagctcacccttatgatcgtctcaagacaacttccactgatcctgtctctgacattgatgtaacaaggagagaggtacgttcaaccaacaacatcaaatttcatttgtaagtgagaatttttcaataaaagaagatcttcacagttcttcgtctgtgttatataggcttacctttcatcagaagagttcaaggagaaatttggcatgacgaaagaagctttctacaagctgcctaaatggaaacagaacaaattcaaaatggctgttcagcttttctgagatataatccttcttcttctccatcaaaagatccggtaatacacagtcgcaaaccgaagattaagatacatcctttttgtttgacagagaatatatggtgaagttttctttggtttttcttgtggtttcagctataaggagaagatacaagggacagtgtcagtgcattttaagctgcttctgctccccatgagaagcttaatacatttttcatggcttgtttaaaaaaaacaacccagagcagttttcttttcttctatttttctttcttctccttcaaatctttctgatttgttttaatgatctgtttgcttgtttctctctatttcattctccattttttagtttgagtagatttttgttttcttcatattttgggattgtttcttcttcaggtcacaggttttgaccttgagtctttgatttatttattcttggggttattttgatatcaaattgaggaaatttggtttcaaaagtcaaatttttatttagtgagatttcataaaaacaaatagactctgtaattttgttttgcagaagttgaggattgagtttttttttttttttttgtgtacagcaaagtgtacaaactaaattgtgcttcctaaacttcagatttctttattttactacattttctcataaatatagaaataccatttgttggccaaaaaagaacgaagaacgaattaccacttaaagtgtataaataaatatttttcaataactcatcaatctctttttctttgacattgtatatggtagctcatgcatgagacagacagtaacactcgaaaaggtaatactggaaaatcttgaaagtaacaacactcaaaaaggttacaaagtaagtaccgtgtaccgagaggtctaaagactaatacatagaagatgatagaaacggcgtcgttttcgataatcatggttagatgccatgtgactgattagagccgtcatgacttaaaaagttaaaactcttttattgattttgtgtattatattagtttataaaactttgatcaaataattcatgtgccaactagcgattgacctagtttttttaatcaaccgaaacatgagtcaataaaatgtgcaatgtaactctctctccctctcttttttccagagcaaattaactagttaaaatgattcataagactcatcacatattgccacatctctctatagttggacgtcttaacgaaccctaatgatttttaggctttttagcttgtcgtactctaaatgacaattatatataatgtacgaaactttctagtttagacttaatttgatcatcaagacagaactattcatctagctgaatttaatattcaacccaagcgataacacaactataatagcaattattgacatattgtcatcatgcaaattgtaaagtcactagtcattgatgtaagatctcttaacaaactcttttttcaatatatttctaatgtgaaatcggataattataatatgtagaaaagttgatacaatcatttactttcaaattaattatcgtctaattcatataaaatcatgcgtagttgtggaactttatttactactattagtaacttattttactgttataatgaaattttgcgtgaaaagcttcttacttgtgaattaattcgcatttggcattacagtgacatgccttgtcgcttttttccagtttagtgtttttttaatcgtatattcgtatgagagaatatcattaattaaaaacgttaaaacaaaacattatcaactcaattattgacaatattacagcatcaaggaacatgttcgtgaccgcgacgcccatttttttattaggataattttcttacattttgttttattgtggatcccttaataatttcatagaaaactaaaaaaactgtccctaatacggcaatcagggatttaatcattttcttaacgacgattaaaattaggtctaatacattacaatatatgtatgaaaacgttgcatcgtctcgcatgacttaattgtctcccaaacatgtagtatttgatgatctttgacgtaatttttttttgttagagtatctttgatgtatatatttatcatccaatttataattagtagtgtaatgatatcacaatacagttcttacattttgaatgacattggtttccagatttaacttcatatgtcttgccaagtaaaatttgtacgcattgatatagtatcatggtcctgactttaagcattggcgatgggtaatgatattaatgaaatatcggcgaaatttcttggataaaaagaaaagattcgtacgcatgaaaccaatatgtgatgttggttccatattcacatagcatttgtaaaatttagaataaaatcgagtttacgtcagagccatccaaccattaccattaaaaattggatgaactgatgaacaggttgaaccagaaattgtcactcaaagttagagcttggttgataggttcttaagactaaacagttcctcatcagtatgtaatataatgaaataatttaatctctttgtgtgtaaggtgttaactggactaccactagactgaatttttaattaagtcttatcctatagtcttttcaataagttcacaattgcaagtacttaataaacaaaataattaatcagttaattatgacaaattagtcaacatccgatcacattccacgttgtaaagttaaattttaaggtagatactaatcatacttgtaaaatgaataagatgagttcttcttcttgtcacctctcgatcttgttttaagtagttggtgagatgtgataaacttgtaacatgccactgagttgtcaaagacaagcatctatacagttattaaaaaaaaaggttaagcatgtaaaaatacacacacatgtcgtagtaaatatacacctttttataattaattatattgtaacgaatttgttgttttgttataatatatagattaatgcatgatgttttgcgattaaagccagacgagttgtaatatccacagccttgataagctctacatgcagtgaacaattttatacatttagaaaaaataatcactatctcgaccatatagaccaggccactacattacagctaatctctggatttacttgataattaagacaaatatagaacattaaaatactaactcgatgcctcaccttagcctcctctcaaattgtcaatatctagatggagtgttacatccacattcctaacagtttttactctttattttaatatatccttcaacagatcatcatcagaataatcatcaaatcattattatatatttaactagcccaaattgtaccatacctatcaatttaaatttctctttctatctactataaaaagtgactctctaagaactccaaagattagaacattgaattgaattagccatggagaagaatacttctcaaaccatcttctccaacttttttcttctccttctcctttcttcatgtgtctctgctcagctccggacaggtttctaccagaactcatgtccgaacgtggaaaccattgtacgtaacgctgtccgtcagaaattccagcagactttcgttaccgctccggccactcttcgcctcttcttccacgattgcttcgttcgtgtacgttacaattttcttttgatattttcgtacaatataagaagtttatttctgatcgaaatgtatccccaaaacatctagatttagagtttacgatgtttatcttctatgtatcattttcaaataaaacattatctttacgtatgaatgtatagggatgtgatgcgtcaataatgatagcatcaccatcggagagagaccatccagatgacatgtcattggccggagacggattcgacacggtggtgaaggcgaagcaagccgttgatagcaatcccaattgccgcaacaaagtctcatgtgctgacattttggctctcgccactcgtgaagtcgtcgttttggtacactaatatatatatatatatatatatatatatatatatatatatatatattttacatcacttagttattcctctattattcctttaatacatattatataatgtccgaggtattgaaaattcgttttttctacagtatatatcgttttcagttttcttgtgcgaaaaagctaatcatatcattaaatataatacaagtacaagtaacaactacacagtgacactttttattggcggtttgtaatttaagacaagtacaagtaacaactacacaggtcatatagtaatctgatcagataataacaatagtaatctgactaaataaaaattgcagaccggaggaccaagctacccggtggagctagggaggagagatggcagaatctccacgaaggccagcgttcaaagccaattgcctcagcccgagtttaacctaaaccagctcaacggcatgtttagccgtcacggcctctctcaaaccgatatgattgccctctcaggtaccaaaaccgaacttaacctattatatttttctactttaaccaaattcttatggtatagtattaatgttattgtgacgttataattcaggagcacacactataggatttgcacattgtggaaaaatgtcaaagagaatatacaattttagccctacaacacgtatcgacccgagtataaaccgtggatacgtggttcagcttaagcaaatgtgcccgatcggtgtcgacgtaagaatcgcaatcaacatggatccgaccagtccacgtactttcgataatgcttatttcaagaatctccaacaaggaaagggtttgttcacgtcagatcaaatcttgttcacagatcaacggtcaagatctacagttaattcgtttgccaatagtgaaggagcttttagacaagctttcatcacagcgatcacgaagttaggtcgggttggtgttttgactggtaatgctggtgagattcgaagggattgttcacgtgtcaattagtgtgatttgaggttttctttcttttattccttaaagaggatttttttttttaataataaaatttaatttcttgttgtcaaaataaggagttcataagtgtgaaacatggaaacttaaattaataagatgggtttatttcgttgacaaaaaaaaaaaaagatgggtttatttcgtttctctcttctcctttttatggtattccagggaggatacaaaatatcaaagtagagatcttggatagatttattactgttaaagataactggagaacaaacaacttttttttttttttttgtaaacaacaaacaattcattttattgcaaaatttataaaagatttgaaacgagaaacattaccaatttattcttgacaaagttatcaaatatctatatcttcaccgctaaaatctttccattcgactataatcctcaatcctctttatgcataattgctattgttaacttgggctacacttggagtctggacttgctgatttgttgcatttgtaatggagaggcccattattctgacccaatctaaaagttctaacaactgcagctttcttcttcttcttctgcttaatttttctttatttacgaccaatgttttcaaactcgaaacgatttggctagtcagaatggagaggcccattatcctcgttaacttggtaagtttgtgactttggtaaacttaaatgatttatttagataaatgatcataaatgttaatatataaattatcaatgataaagctgtaacttcaagccttcagattttttttacgttttgagcaaaatacccttagcatttcgtataatcatatgttaaacagcgtggtatcactataagatcaaaccaaataatcaaattgcatataatcattattaattttttttatttttatttttaattgtatattatttctctaagcaacatgttatatattttgtctaaaactgtttcatgagtaaactagtatgtcgttttgagtgtctaccatgtttgttttctttcttaaatctcttaacatgtatttatagttatttacttgatttaatacttatttggttatagttttgaaaaaccttgtcaagcctacttgcatgtggaccaatggaccgaccaaacaaaagaaaagtttttgtttctttaacgcatagaacccaataatctcattctcatatttattttggtcgtcgtacacttttgagttccttttttggcaaaacaataaaatttcatgttccttttttactaaatgttaagttaaaagagctatttgaaaaacaaaataaaatgcagaaaaaaaaaggatgtgaaggaggatgcgactcgtagttgcaatttccaccagatacaaggaaatctttactgcgtttcccctgtcccattcttagttttttattacattatttgtacaacacaatagtttaatttatataaagattcctgccaaatagtttgacattatgatatgcgtccttcgtttttaattatttctgaacattatgttaaatgcccttcgttcttgtttaaatcttatatatatgaatgttttattaacaagccaacaaaaataaacgtgtgtgttacataataatacctagagagctagacattaaaaaacctctatacgtatatggatgaaacaaatgatacagattgttaagccatttagaaaatccgtggaagtgcaaaatggttgaaaatgggtgctggattatgtttattttttggtcttaatcgagaaaaatataatagttatcttgtattttattcgtatgaagtctcttttactatattatcatcatatcatggtggattatacatttttaaatatatttaagggaactaagcataagtgatatgttaaacctcgatcctttttaaagtaactttttatctatcctctaaattttacgtaatgctaaaattttgatcacgaagacaggacattacatatgagatatatagccatataggcagtgttcttttctactctcaataaacgaagatgttgtagaaagaaatgttaaagtgagtgcacgtggagacatttgcgaagaaaatagctccaaattaagaatacaaacaaaacactcgaattcaaacccacatgagatgtgtccctcccaaatcccaatccaagccatatctttttctcctctatctgggtccgcttctcatattattgttgcttacacctttttaattcagtttaactatttctttttaaaaaacttatataaagaagagaaaacaaaatttaagaacagcacaaacaagtcataacatgccatctacaatattcgatagaaatctccacagaccttgtacaattcattctgacagttttgtacgatttctttgtggttcatactgcagacaaaatagttctatactattttaatattattggcattagttggttgtattcattattgttcctttatatatctttttacgtaaagatactgttgaataattacgaatctggttttacctagcttgattgtgtgattggaaagagttacatttaattcggtcattttttcaacgtggattgtcaaaggtggaaaaccattaagcaaaattccaagaaacttttatgattatatgcattattgttcaatgtctactataggtgtgaatgtctagtatctattttggtatccacatctattagtttgcatctcaatttctttctcctcttagattatatatatatatatatatatatccaatatatatatatatattatttcgtttgtttttaactagaaaattcctctacctttatgtacttttatctacttgtatttagtaaagtttatagattaattaatttcatctagatgggttaccattaacacatgttttccacattcaatcaaaggttatgggattgcattaaaatataatacgagaaaacatcacattctaacaaaaaaaaagattatttacaaaagagaaataaaatttccttgctgcattgattgataatctactaacccttgactttttttgtgtggtaggataaagaacacaacaaaaccaataagagatcattcagttttggctattaacaacaaaagctagtaacgtgtatattgcatgtatcaaacactataagattaagagacaacttgtaatgtctcaaccgcccatgtttagtagttatagatattgtttggacattttattgttattattattattattattattatatatatatatatatatatatatctaaatgattcggtatatattttaaaaaataaaaataaaataacaaatgagtaacacccagactttcatatcatatcaaaggtgaccttttgtgtcaacataaactatatttatctatttacaaatcctataggaaaaattaaagtcatctttaaacctggaatgcaatgatgcttagaatcaaaaaatcacgactaaaagtccttgacaaataaaacgtattaataacccaattactgaccacatgcatcttaactttatgttaatatgcgtagtaaagaaacttgtatctacgtcatattagttacagtggcagtaaaattcagtttcaaagatgtttgtcttgatatgttgtacagatcaccaattgaactaccactaataataactaaatttctgtttagcaagttaccatctgtatccaaatatcgcaaaagtagtgggtagtgaaacccaaattcatcacacatgcagcataaaaaaaaagaaggtcaaatggtatatataatatgagggagatctatattaagataatatgggtagaaatgacatagattgatcaaactaattaggagattggtccaaggacacatacacatgcatacatgtattatgtatatacaaagtgtgtgagtgagtgagtgagagagagagaggttaagaggaaggaacatgtgaaagcattaagagaaggtggggttttgtattgatgtcttgttcttggaatggagccacatggtaaaagggtctctcaaagcacctctttaggggtagttgtgatgcagccaaattagagctcttgcatgtgactccatgtgttttttcttccctcacccattattattcccaaattcttcttttcttatttttctctctttatttatgtatatatatatatatatatatatatatacacactctctttttgttttcgtgtattttctaaaaataaatgtattatacaaaaaaacatatattagttgatgatattcaaattccgttgtttttaaaatatttgtctaaaaaagaaaactactaactacgactttcaaatagtcttgtgttttgtacgtgaacgaaaaataataacactcccaaacatattacctcatatatgtatacaaagaaaattaagttctacaactttactttatacatcatcaacgcttgttatatacaaacaaacgtaggacaccgctcttctctttctttgtctctctcatattctaagtttgctatatatgtaactttctcccttgtagactttcatttgcagcaaaaatagtttctcatatggagaggcaaatcataaacaggaagaaacgagtgttttctcttgaaccaaacaagaaccctagtgcagttttcacgagaaaatacacaagccacttggttcctgcactcaagaagctcaacatgaacaagaactcttcaaaacaaaccgtgaagcatgaagtagatatggctttggctttgtctgctcaagaatttgcatggagccgtttcttgctgcagaagctatcgtcctcatcgaatccaaccactaccactagttcttcttccgatggaattcggattcttgaaagacccgataaagaaggcggaaacgaagaaggagggatagaggagagactgagggaattgaagaagcttttgccaggtggggaagagatgaatgtggaagaaatgttgagtgagattggtaactacattaaatgtcttgagttgcagacgattgctctcaagtccattgttcaagatagtacttgacttttagtttaagtgtataatttatagtttgtttcatgttttttttgttgtctttaaacgaaaatcatctgtgtttttttttttctcttgatttctttaagaacaagagcatgtattatagtgtttttcttttttccttttcttaattaatcatggttaccgaaatacctaaagtaccacacatggccgtttatacgtacatcttataaaattcgatcaaaatctgattgaaatttaaattattggttgtaatgccaaatagacgatgtgctgcctaaaataaaactcttatgttgtctttttttcctgaatttattattttaatgttatgagcaaatctccaaactttaatattctaatcattttaacctgacaaactttgtgtttgtgtatatatttatattcctgcaagttttttttctcctttagcgaaaacatatgaactttcgactacaaaaaatcagatgtaacaaatcttcaattaaataaaagctacacattagtagagatcaccaatatgttccagctgcagtaactacaggtgcaccattaaaatgtaaacaaaaattaggactactggactagaattactttccaaaaaattcgatgaatatgaaaaacaaaacgccgaaattgtaaatatctaaaaaggaggaaagttggatgacatatgtgtaaactatgaaagtcataacattgatttgaagtcatcatccatatctttgcacgtgtctcacagtcactcgcacgcatccaaatctctctatttctcttaagattctagccgtactacttccacacaacttgtctcatgtcatgtttttaatggcatttttaaaggatagtgttatttaattgatttggtttcagtgaaaaaaaaaaagaaaaaattatggttatttcccttctttacaacaaacaaaatttgatttaaataagcaaattgtttgttgtccctaggtataaataacatttaggtactatatataaaagtaaagaagccggaagaaaagttggattacgaaaaagaagaagattaagattacataggctcatggaataagagcaaagaagagaatgtgcatgtgccaaatgccaaacacaaaggcatgccttgtttcttcaaaagagcaaattatgcaaaagtacatatttgagaaacaagaacactaacaataaggtttgggaagagttatggcaataaacaaagatctctccctatgtgaataataatcataagaggtggtgaagaaaaaaagaagaagaagaagacaaaacatgagaggatcgaagatcagtcatatgtttggttttactacacagtgtagtgactgggagtttcaatgtccaagccctttagcttcacgactgattccacatgtcccttgagtgtgtgcagctccctaagcctgtttaacatataacaattcaattagtgtttaattccaacaaaaaaatacacttagattaaaaagaatcgtgtgtgatcggatttattacctagcgatctcagctcttctcttagcttgctcagcgatctcagacaattctctgtaacttcctttctcagggaagatgttaacagcttcttttggctgtaaaccgtgaagtgtcctttgagcaagtgcccattgagcctctctctcttcttttccgtaatctttcttcatcgtgaaagccgtcttgttctcaaacaagttgagccacgcctttccgctcaagatgtatcgaatggcaaacttgaaaacgtccaatgggaagtatgtgacaatactgtatagccagatcacaccagcccatccccatccaatacccctaatctttgcaaattcccagttggcgtaaaccgcaatcaaagtagcaatctgcatttggaagaatgaatggatttaacgggtgcttctttgagaacctttttaccaaacaagaattcccttaaaatgttgatttgatgaacttaccagttgtgcaatgaggaaagcaatcatcagcaatgctccaggacgttcaacaaaagaccaactccttgatcttgtgacgaagatcagagcttgactaatgatactaacttgtaagtacaccgcacccattagctcgtggttattgtccctaatggacctcacaccgaatgtgtcctgtgaatccaatgtgaaatttactttacaactctgaacaagaacctaagaaaaaacttctgtaaaagagaaattaattagctcaattgtatgtaccgagaaaaagtcagtcttgtgcgccgcccagaagaaaataacagtcatgatggcctggtagcctcctagaacgactccagtagcaaaaatttctttaagtttccagctatcaggtgtgggagatggcttaactctgtcctttgagattgtcatgatggtacctataagatcaagatagcaacacaataccaaaagatataagtaaacattgtagaaaaagtaaacaaattttgaggtttatacaaaaggacagccattgctcaccgtcgttaagaatggcaatgatcagaaccatgaaggctgagaagtcaaattcccatatcaaagcaataagcatgaaaccaaactgcaaaaagtttcaacgcaatatgatcagcatactattaatccaagataaaaccaacaagggccagaactcaaacggatttatttgcataccacaatacggatggtgattgagactgcatagatctgtaacaagagagaaaaatagaacagagtaattagtttcaattgcaagcaagcaagtggttggaataaattaaggatgaaaaataggagaagacgcacagtatagttcttcattctctggaaaatagctctgctggtgagaacagcactgataataacgctgagtccaggctcagtgagcacgatatctgaagcaccacgagcagcatctgtagcatcagcaacagcaataccgatatcagctttctttagagcaggggcatcattgacaccatcaccagtcattccaacaatatgcttcctctcctgcaactttttcacaatttcgtatttgtgctctgcaataaaaaaaacaaagcttagaactaacatcaccacctttgcaatgaacatatagtgaggtttataatccaaacaataaataagcagattataacctgggaagactccggcaaatccatcagccttttcaatcaactcctcaacaggaatggatgcgaggtttgcgtctttgtgtgtaccaagaagagccgaagatggatacatgtttgttcccattccaagtctgcgaccagtttccttaccaatagcaagttggtcacctggccacatatgtgttcaagagaatgttagggggaacttgtgaaggtgtatagctagcacaacaagatagatgggtagacaaatttaccagtgatcatcttgacgttaacaccaagattcaaagcccgtcgaattgtttcagcactgtcatgtcttgggggatcaaaaagtggcaacaagccaacaaattcccatggcgcacctgggctttcctttgttttctctggcaccacctacaaaagggaataagaagacaaacagttgaacatttgttaccactgagaaaagaaaagcaaaaagggactggaactatcagtattaatggcgaataagtacctggcgagcaacagccaacgacctaagaccacgctcagcatacttgtcaataatggagagcaccttcttgctaagatcattgctggctttggcaagttcgaggatctgttgggagaatcaaatcagtataaaaaagaaaggtaagaaaaaaaaaggattagcttgtaaaattaagatccatcacctgctcaggagcacctttactgactctgtgccagttaccactgccgtcaatgtaagtcaaagcagttctcttatccacagggttgaatggaaggaagtgaacttccctgattccagctctagcctgtgaaaatcccaatcaaacatcagaacatgtttcttggacgctcagtaaaactacaaataacatgtgaaccaaaaagggttatacctcctttggatcagcaagcatcccaaccatggctgcatcaatggcatcctggttctcaaccctggaagccatagctgcaaataataggacttgatctttctccacacccttgcagaaaacctcgaccaagtttttgtccacactcaatttgttgagggttagtgtcccggttttgtcactgcacaggacatccattcctgccatctcttcaatggcagtcatacgcttggtgatggcaccttgctgagacaacctgtgagacccaatagccatggtcacggacaagactgtaggcatagcaatggggataccaccgatcaagaggaccaaaaggttgtcaattccatctctgtactttcggcgttggatcggatacatgacgatgatctcaatcaccataccgatagcaatggaacagatacagaagttcccaatggctgtaagaaccttctggaaatgtccaacttggttagtgctgtccacaaggtgagcagctttaccgaagaaggtatgaaccccagtggcaataacaaccgcctcgatttctccttgtttgcaggttgaaccagagaaaacttcttgacccgggtgcttggttacaggaagggactctccagttagagcagattggtcaacctttaaaggatcaccttcaagtagacgggcatcagctgggataatgtctcctaatttaatgctaacaatatctcctgggacaagaatagcagcttcttgttcactccactttccatccctaagaacctgaaacagagaaacatcacaacaagaaccaaaacattagctctagggaaaattcagaaagttctgtataacaaattcacaccattcattctcttatcatatatataccttggttttaggagcaagaccagccataagagcagcagcagcattaccagcattgttttcttcgataaaactgatggtagagttgataaccaacagacagataataccaacaaaatcctgccaatccggaggcctaccatcaccgttggccaaagcaatggccatgattgcagccatttccatgacccatgaaagtggattccacataaaccccaaaaacttcagaagtttgctttcctgtcaattttcattgcacaaatcaccaaacactcagtaacaaaaaaaaaggagaccaactatgtattttatctgagagctacaaatgcaaaatcagacctttttctcttcgagcttgttggggccaaagatctgaatcctgtcctccccttcctgcgttgtcaatccttcccttgaacattttagctgctggaaaacttcctcaatcggaattttttcctgaaaaaatcaaaagcaaattcgatcagatgaccaaatccaaacaactcaaactttcacatacacaaaacaagtttctaaaccttaaaaaggagaaaccttttcttaagtaaaacagaaaactttgatgattttgtaaccgtagataaatctactctgtttcataagtacaatagttggaaaaaagtcgttgactagttcggtgacaatgaaatatttttggcgggggggaaatagcggtggtgaagtggggaccgccaccaccgaccaacgtgatggcgacgtgaaacacacgcgccgaaagattcccctcacttcccggcgtaaaaatcgaggcttggtcgcgtaaatacagtccaaagttatgtaaaagtagcattttaataaaaaagattcaaattattgtcccaagaaacacagaaaagaagttacgtctgcacaaaagatgtgttcttttttgttggttgctaaagacagagaagttaaacgtaccacggaaaggtacaaccaaaaaaaaaatccgaacttcgtgttaagtaacagatttgattaaagtcatatttattttttctaaataccaccaaataaattcttactagtaaccaaaaaaagagaagacaaaacattgtacaagtaggtttggactttattgagacgtagctagctccaccactgaaaaaagagactctgttttctttatcttgtttgtttactagtatatcacatgcttagatctacttttttctcatgaacaaactcttcatgtcctccaaacgtttcttagacttaattactacccagaaacaaaaatatagtctttctaaacaaatttcacatattcaaaactaaatcgatgaaaatgtatatataaaaaacgaaaccataatgagagtaagtaataaccaaggaaagactttaaagccaccaagtggatacagatctactctcattcaggcagatcatcgaacagtttgtgagcataaaataaaaacagaggataaaaaatggtataccagatcaacagtctcgttcttgatatcttcgagactcgacatctctcaccactccttcactgagaaaaacgacggcgaattagtactcaacacgacagctttgtccgccgtttcactcgatcatatgtattccggcaaaatagagagaaggagaggaggagagattaggtggttctgttgcagagtcgatacgagtcctctttttataagccactaaaaacgacgattttctccgccgttttggctatgtgggtcccattaccaagtagtctctctatatttattaccctttttatttattttgctgcctctttaagttcttaatcaccctttgaccgttgattaatgtaatatttttggcttatgaacccgaatcaaatttgtatatattttgtgggtcctaattacactttaattatggaataattgttcattttaaacaacaaaattttctaccgttaataattcttattttctttttattttgagatattttgatgttttatagtagtttgaaaagggactctaaggaggaagtagcttataagagaaactaatttgtaatatctctttttttaattactagatcatagactttggtgttttttttctttcttttgtcatgaatcattatatcaagaaagaaatatttggtggaggtatacattgcttggattttttaatttatatttgactaagcaacatactacttgctgcttagcctgtcctcttcttcatttttctttttttttttttggacacctattaggttttgtttaaagaaagatatttctttctgaaaatttcaactaatactatattttcttaacaaaatcgttttccaactggtttaggttcgttttttctaaatttgttttttcgataagcaataatgggttacttcggttttgtttccattttttctttctcaaccatacaaatacttctccaagccaaaacactttaaatctctgaaattttgacagagatgcttataacaaaaactacataccttgattaagcaggtaagaaaactactttttcttactatttttacattatatcagttggtgtggatcgtaattagttacgacggactaatttatatagtagtaatttgtagaatagtaattttaatatatatagttatttgtggccctaacgttgataatgaaaatattggcccttccaaggtgtgcctcatggcaaggtcagcaatgggaacgatgtcacatgttaataattgaataaaaaccatagtgttaattaaatttgttccctctgaagatatactgagaaattgacttttgattgtgatgggtcccccaataatacaaagttcgtcatttccaactcctctacgttttaacttcttaggattcatgtcctaattaataagtgttcaagtctaaacaaacgtctcgtaaattaggtaaagagaatatgtacaagatacgaaaatcatttcttgtcttttcttttcttttcacaaatgatggatagaaaaattgtaaacaaaatgattttatttatcacatttttttatcatggggtaacaagttttagattattgtatacagtaacatactttacatatatatcatactatttatttgaataaaatacaaaaagacatcacttatttacagtttgccacaatatttctttaccaatataattttggtaatctagtaaaataagttcactatgtatttaattttgcagctcaaatgaaccttaactaaattatttaaaatataagatataatatattatcatctagttgacttaaatgactcttacaaacacatttaaaaacttatcatgtcatatatatgaaggaaagaggcaaaatttgtccttaatgcacactatacatatagaaaagaacatctgaatagccatatatcatataactactagcatagtcctaaaataatcaaggagtttacagtcgcataggtacatatatgactgaaaaatgaaaaaccattttgttgacctcattagtacaaatttgcaaccattcatctttttcaaaagttgccctttcatttatgttagaagtcttcattttgacttggtatattcttctattcattttgtcttcgactatttacaacctgcattgaaactaaaatcaatttaattattttgtatatatatgctagagcttgacttcattatagattagatattttatatatatatacatatatatatatatataatataatattaaatatgaaactctattatgtaacaacgtgtatagccgattatttgtctaactccagaacttcgctagataatctttatgattaacgtcacatatataatcatggaacccatattctagggtggtgataatttcagaaaagagaaaactaatgtaattactgtgaaattatttgatttaaatgattactagaagatagcgtggactatgagcttgcaatcacgcttgtcgattagagatcattgctcttattagttagtcctcgaacataaccaatgtattttagaacttcatcactgtaaatttgtatggtaaatgttgccgtttcgtgatttataaatctatgaattacattcatacattctattataccatttattttatattatccacgggatttctagtattattaattagaaatacagattattagcaatacatctatggaatctgcatttgacattttcattaactaaaatataaaactcgtaaaatcctagggatatcattatcgtgaaggcgatgttaaaactgttttatagcgtgatgtaatatatgcgttgctatttcataaaattagtcttctataaaaaggaaatatatagcacacaagttttaacgtattaattcgacttaagaatcttattagtacgtacggtcataaataagaacacacatgtatatcggttacatcattgacttgacatcgatctgatatatcgtaaactggcaatgatccaatcagtatttgaatttaatgtagttttgcaattcaactaatttgaaaatgaatcgaatatatgtacttgaacgcttgtaatgttgtaaagaaaatttacaggaagttttgaaaagataatattctaaaatatctataaacagtccaacaaatccagatatatctgtttactttaaatttgttcaaaaagtaaacatatttagacgtacccagaaaatcctgcaccatgtacggcctcacatgccgtcttgtaactggagataatcaaaaaggttagttacttgtccccttcatattttagtctttttatttctaatatatctgttcagaaaaagaaaaaaaatgaatgtaaattttttcaataaagccaatcacttggatcaagaaattccaaaacagttatacatttgtttatgaagatttttcaaattgcaatttctttgaaaccacattggtcaagtgacatgaacatttactcataaagacattccttaaatttaaagtcactgaattaaaatacattttcctataaattattagtattatatggcataaaacaactaaatagatcattttttttatcggagaacttatggagtgttgaacttgaacctaacatttttagccgttacatgcaacaaattaaatatttgatatttgtttccgatcacaaggccagtaaagtttttgtgatcataatcctatagtcttattttataaacggttttcgagtgaaataaaagaacgcatacaatgtttataatcgcaatacaaacgaaaaacaagcaactcgataaaaaaaaaaaaaaaactatagggttagtttggatgtagcatttttatgaagcaaaaacgttggactctatcgtcctcctctgaaaagtatacattccatcttaatttgctataatgcatgtctatttttcgttaattcctaaatacgtaacctttttatgggaaagatctcttattgtcaaaattagcaggcgcatgtgtccattttcgattacgaaatcagctttaaccaattgataccaaaaggtggaaaactcttttttcaacggtcctatcagtatagaaaattatttagcccttctgacaattactattttttttagttagggctttatttgttgtagtcatgggtcctctattatgaacttatttacagttagagattctaacgccgtgagactattatttgtaataaccggcgtgtatttgggcattggatgccgtgatgagtgttaatgagaagaagaagtggtggtggcaaggagacttcacctaatctaacggggccgttacctgttacgaagaaaaagagaatctgaatggttttttatttaaggatctgtcacttttacataaaattacttccaatcattcgtagccacgtgtacttgtctacttacacaaaataattgctactgctactgcttctctgtttcagataaaatcctaaatccattgaatcttgtaatgtgtgaatccatccacttgaaccaacctttttggtcttagctctttgttgctcgctcgatcggtggaaataaatgatttcactgaagaaaaaaatataagattttatcaccaattgttttatatctaaaaccgaatattctaatttcaccacctaagattatatattaatgactaatcaactaagtgaactggtttttttcttagtaatggtatgtgaagtatctttattttttttaaccaactactagtagcaagtctagcatcaccgaccatgttctgaatataacaaaacatcctcaataatgagatcttcaattattttttacgataatgaggttaaaaatcattaatggtttgaccacaaaattagcattttgacttttgtaaatatggggagaaatgaaattatatcgacatgaacttaagttgactttacgctagtttatggattttgatggttcacatgcaaatagtaatgtaaaaatggaatggtaaaaggtaaaaatctaacccaaccccattccgtataaaatattaaaatgttttgatctctagttcgagtgaacatacatatagttcataaccttttagttacagaagttgatcctcttaggaaaacgaagccatgtctagagaagatggctcgttgtggtgatgaaagacataattagacagaaactactagaaaaatcttaacccttttgtcccatattttggctttatggaaaagaccgcggcatatgtcatacaacctttgttttcttctttttctatgtgtgtgtatgtcgtatttatacacgtatatctacgccaataatttttatgttgactctttttctaatatttataaatcgttgaataggattccattaatttgatgacatattcacatatctacctttagtttataacctaatctatctatatttttaatcataatcaacagcatgctaataaatatgaatgttgtctatttgattcattttacaacgcatgaatattacacagtaacaaacaaactggtgagagtccaagtttaacggctacaaaagggatttttctattacaactattctaacgaaaagttgaacatataaaaagcatataaaagtttaagaagattttaacagacatattgtctacagacacagaatttggtgttaagttgaaaagaaaaaaaatatatataagaaaagcagtttagttcaactgataagcggtgaacctcaaccgttcggtaaagagattattcgatttccatcatatagtctaatggtttttttttttttttttgggacaaactaatatcgttgttatgttattatatagattgaatgaccaaaaagaaacgtaatgttaaacaactggttttttgttggagttttcgaccactgtgatacaagaattataaacgtgtgtggaacgaattaacagacaaaggcggtaagaaaataattaggtgaaatagtgaatatttctcgtgaacattacatgtaatttttcgtgaatacgtgatcgactagttttcttggtcaaccaaagaagactttttcaccataaaatgatactcaaagttatacacaactgcgtgaaagtaaatcccaacaagtcaacaccccacgagcaagtggacggtcaaccaaagagactaggatgttgaactcacagctaaatgcgaccaaagtgaataaagtaggaaaatttgtaaaactttaaaataaaaccgtaccgagatatcgtaactttttccttccattacaagaacctgcgctacctaacctcttcactttgtaatattacacataatattagttgagacgaaattaacttttgtacgaatcgtactaagactcctaaagaaaatactaatatcatttggaattttaaccaggagggttggtaacattggaccgttttgtcttttggtccacacaaatagattaaattcatgtggatccacatacatatgcactgatgcacatatacatatctttacacgtaaatgtctgtaaccatgtgcatatggacaaatagttcattaaattttatctccttacagagagaccaacttgtggaagttacttatatggttctggcttttatcatttgataatgattccaaatcaatttcttaagaaatataattgtccgtacttatctttctaaactaacgatcactggttgattaaattaatagtagtaactaaaaataattcaatagctttcaaagttgtatcatcttaatgggatctttaataattgcattgtaaaataatacaccgtcacaaggataacgagtttcctcgtgccgtgtctcccgcagcaagttgcatttcatgtcacaaatacttgaaaaattagagtttgaaaccaaactaattaataatatgaactagaatcgaattttgttatttaaattggtatacggaattttgttcaacagaacaaaaccaaatcaaagtaaataaaccttaaagtaaaactcgacatggaacacgcctaaaaagttaaaaccccaatctaaaaaggcccaaagatgcactgcaatatgaagttcttctagaactcattaaaataaatagtgtgagtgtatgacccttgttgattaaccaaatctataactttatttgtatgcatcatcattttgcagaatacaatattagataatgttattttgtttatagaaaaattatgaaccagaaaatatattacatgatgaggttgggtgttccatgatacagtttcaacactgtatattttcttatgctttaagtttcgttctcaaatttagaaatattcgcatagatcatatagtctcttgcattatattttaacgaggttagttaatctgagtgtcttccgccaaatccaatatatatatatatatatatatcgaactagcttgactatagaagtggtaatatatatatatatatatatatatatatatatatatatatatatatatatatatatagaaacaaaatgatttcaaagaatttatatttcaataaataaaaatagacatattttcataattgaaaacgacatattaaaagggtttatcaagaaattttttcccaatcgacatgtgaacatgtacatgtggtatgtacggataaagaaataaatatattttggcaaaatgaaaagaaaaatgaaacagcgaaggacctaacaatttatatacacaaattatatccacaaggcttctagacacaaagggacaactctattacaatacagtttggcactatcactggacctaattttattcttgtttttgtaataatttttatatatacagctttttcaatttcaattatgttatatttaatttttgttattaaatttgaatgttaggtcttagttatttaatatttagtgataagtgtggtatcatgcatgtgttttctttttgaatttattaggtggccatgcttgtgcgtctgcttatcttcaccccactttctctacacacattccatcaaattttaattgaactatttttttacgacgccatttgtatgcaaaatcttatcatctattgtgttatccacgttaatatatatatatagtattttcatctgcataaatatattaaactacaaaaaaaaaaagattcccaaaagtcttgagtttataagttgcaattcggagttaaggcatcgtagtatagttaggatccaaatacgttgtccattgtaagcgttttcgaaagttgatactcctttggtttcagtgattttgacctcagatttgcctaaatcgaattgtagtatttttatttctttttgccaaaatgacattattttcgatagtgcttttttgtaatacctctactcttcattttcttactgatattaacgttcatagcaaaaaaaatatatatttttttaatcgttctgttttttagttatcagttatatcattgttggattgactaaatatagaaatttatagtttcagcgggtaatatacgttgtatcaaatactgtacgtctataacattcgttttcggaaagaaaaaaagttatctacttaaagttcaatcatatatagtcaaaaaatgaaagaaaacgaataatcaatcattcaaaggtacaatatatataaagcttcatgaaaaaggaaaatgatcggagtaggatataggattagttggaaaaaaaataattaaaaaaaaaatatcttagaccagataaaataaaactttgtagagattctttgaaaacacatattttgatgattaaagaaattatactgtcataaagcttaatccgtacattcacggaaacaataatcagtatttaatgataatgtttagtgagatggataacactacaatttaagaataagcatatcatcttttcactctaaatgtaaaaaaatgtaattcgctttatctctttctatcttttgcttttgtctccgttgaatttaaaacgctcatgagaatgactataaaaatgaaaagctatatgtgaagacaagccaaatcgaagtgaaaaagtataatcgcactaaatcaattcacttctagcagcttctttgcaaaaacatcgactaacgtttttgcgttgagaaacggtcatatgacccctggtgatttggaaactcatcattttatcaaatagtgagttatttgatagaaatgaacaaattcgttagtttaattaattttatgctatttttgttattggcataagttttgaaaacaaatttggtatgcctatattttcttcaacgcacatgaagatatcttcgtttatcatttgcatcgaccaactaagttattcgactaaccagaactgattggcctaagaaaggctctcacttaatttacctctgctcattataggttggaagcttcaaataaaaattaggaaatgtccccaaaacaatatggaaaggaaacacaaactaattctataagatatttatatatatatatataagattagtggaatatggagcatgctggaaataacaaaaaatggtttcagattggattctttgatcatataatcagacatggtcattttgtgtccgtttcctactttttgcaactttaaaaaaactatgggttgagtatatatattactctttgttttcttgttgttcttgctaaagattcgctgaaatcataaaatattttcaaaggtttctaagagaggaataatcgtaacatgcctttgtccattttttccaacattcaatggaccagctttcttcttcttctttttctttcgctttcatgtgccttttctttttctaccccatgatttggtaaaaagaaatattatgtgcacacttctattcatggtacaacaagttggatacttggaatcattatttccttccttactgttgattcaagttgttgtatatagtgtatatatgtaccaactaccaagtttcttaagtcaatagaaacaagtgaacaagaaattctcaacatgttaggcccataagggtctccaatcatttgcccaaaagcacatagatattattgggctgttaggcccataagggtctccaaacaatttgagaataagcttgaaacatcctcagatacactgcaggaagaaactaatagtgtagtggttattgcaaatcacacatccgatgttgtttgttgggtttggaaatctggatgtagtgttgcattgcaggttactatatgtcagaggtatttggttcaacacacttgagatcaaacctcataatttgtacttagtctgtggttcgtctagtttaggatagtagagagtagacatgtagagtgattgttgcaaaccacccgaacgctggagaaagtcactatcgtgcttctaagatcaatgaagccaaagagatgatgcttggaaaattcaacacaacactagttctgctttttgacatctgtttgatacgaaccccaataaaactatatatatactttcattgcttgttgttatgaatgtacgtatacaaacaaacaaatgtgatgtatatattagagaaaacaaacaaagtgtctctgcaacctctttgtgcttaaatcaactaatggaacccataatcaaaccaaaaacctttatgtgatgatgaatgacgatgacgtattagtttgttgcatttgttactgcagttttcgaattccaataaagttggatagctttatttacaaaatataaagtttaaacaaatttaatttcgaaagaacttaaaatcttcactgttctcacagcttcatacaaagaaatggtcattttcataacctacttgataaaataacataatccaatagtcaacgaaataagaataattcagtctaggactaattactaaattataaatggaatcaaatccactaaaaataaataaataatccgacaaagacgatctattcgatagcaacagtactactgttcttgcatggaaatgttccaataatgcaaatttcccaataattagaataacgttttgaaaatgacttgaaaaaaacagagcacaagttcccattctctaatgccacaacttcatacagaatccagatggaacaactgcagacgcaccgctaccaccaaccgcagaacgctttatcgaaacacggtcgtcgaaagtatcaatgagctgctcagccaaagccatgggatcatcaataaatgtatcaatgaatatcttcacaactctaatctcttgtgacgttgctctcaagctataccaagtcagaaacttctgtctgaaattcttatcgatatgtcctgaacactcgagttgtcttatgatcttcacacaatgctctaatccactttctgttcctccattcgctgaatgatcaccgttgttacagttgtctttcatcgatatttcgattctagcttgacggttcttgatttcatctgacctgaagggagtaattggcaaactcgcatctgaactgtttcgattaccaacaagacttttcgtagtaaccacgactggagtttcagattccgtcttatccagaacagcttcttgttcttcatcatccaacaacacaatctgctcaacgtccttctcaatctgtacaatgtctgagtcggttgtcctcttcatccttttcgcagcactttcatcgactgaaggagaattgttgtcttcgttctttgaagatggcttctttgggacaatgtaatcgttgttggactcagcttcaacagaagaaggattagaagacaatgtgctgcaatttgtgagagggcttacgcttctttccactgccgaagagcaattcgctccttcttcagcgctacgtgtcaaaacattgatttcatcaacgcccatttctctggttccactataggacacaactttgaagcagtactcagaagctggagctaatccagagacaacaaatcttgtgtttggaataaacaatgtgcaagtcgatttctccgggtaatctttttctggtaccttacgatgccaaatactgtagtgaacgatgtttggaggtgagggaatttcattagaggcgagaaccactgtaagtgaagtcgcgtttacatcctcgaacctgatcttggttgatcctgtggttgctgtatctgcagatatctcattgctcaatacataagaacaatctacgaaacaaaatcagagaatcaacattattcaacaaacttaatatattactcaatcattgaagggtacaaaagttctgaccttgctgcatcttggagctgcgaggtgaaggtaatgcagcaacatcaggaggtgtagttgctatagtttcaagagattcaagagcagaagagcaaagtttctgcacatcgggtcccgaatgaagtctgtttacaattcctctacccattttcataggaagaccagtgagaggacccacatcagcttcaagagtcttgacagcttcatccacaacctcacacagatttcggtatttagttgagctcttcaatagtttctggactaagaaaagacggtaacaaagcacttctacccttctggtttctttagcaatcgtcaattgcttcttccagcattcaagcaaactgtttgctttaccgcaagagacacaatagaagcagcatccctcactttgcttgtcttttccaagaccggatttttcagtgttgaaagcacattcaagatgacacgagaatccgcaagactcaccctcaaatggaggatctgagctacatgttaaccagagactaggatctttgttatcatcatacttacgacagatgcaacatgaacaccttctgcaaaacgagtcttcctgtctcagtacagcacgacaagccaaatttttgcagtagatggtagtactctcacctgaccaaattctatttccgggttagtatgtacaaaaaggttgataactttgaaccaaaaaaagaagactgtttacctttagtattaaccgagctgcagctccctgaggcattgttgcttgttacaatgttggttgctggaatcacataccgagaaggattatcaaccttcctttgtctcttagtgtttctctgaataggcaaacaatcagaatctctcttcttcccttcacactctccagagtttttctcagatacaattttcaaaagggtctcgatgatcttgactttggtcaaaccagtatacttcctttcttttcccatttctgcgcataagatctgtagaatctcttggcggctccatgcctgcaagacctcagcagctagatgtgattgcttcgacagttcataaacaagctgtctcttctcatcaacactcatttcactgcatttcgatgagtcacctgcagctcctgcatatagaagaaaaggaagtcaaattatgtgaactcaaagtgaaggcaatggagaacaacaatgtcttaaccagaaacacacaaaactatccaagactaataaaagaatgtaccaaagaaacttgtgtctgatcttcttgtttaccaaaactaagaagaatgattccaaattcaaataaatacaaacacaaagctaatttagaatactgaaaactaaaacactttattcatctaaaaacaaagatagttcaacaaccaccacaggacaacaatgttgataaggttgggtcaatagacatcaaagaatcagagagaaccaaacaacatgacaaaggaaagatcaatgctcttcaagatgattctgaaaccaaagatccaaagcaaagaatgaaagcatgattcttttaggtaacagaacccacattcatcaatcatggaatcttattctatacacagaacaaaagtcatatagtcttctgacgcacgattaaattaaaaaacagaattcatcaaaccaatgatagtggaagaaacacacacacacacatacacagaagaatatgaagttagaaccaatcaaccaaaaaaaaagtaaagacccaccatttagaataatcaccaattagaaaacataaaacttgcaatagaaaatagaaagattagtaatctaaactcagtagcaacttagtaaaaagtatataaagtctccaactttcgaaaacaattgaataaaataaacacaaatttgagaatccaaagcttcatcattcatcatcaaagctaaaaacaaagagaagtaagactatttatttatttttgaaagttgaaacattattatagggaaaaacaaagagacacggatatcgataaatcttaagcaaccaatgaaacccagaaatctaaaagtgaataccatcgagagaagaatccatgagcgtagagaagctgtgtgtgaagaactaatcaaacccacattatcataacaaccactcagaatcttcaaatctctgcgatgtgaagaaaacataaaaattaggtaaaacaatggaaaaaaataaaaacttttatttgggagtgaaataataaaacagaggagagagagagagatcgggaaaaaagtataaaaggaaagaaagttacccaataaggaaagcttaagaaaaattcgtcgagcaacgaagagattgaatcggacgttttttttttcctctctccctcttcggagaaattcccggagaacggaatacaccggagaagagagagagagagagagagagagagagattcgctgtgagcggagaagagatagagagagatagagattgtcgctgtgagataggaagagagaaagagaaagaagatgggtctatggaagagagagaggcctataagagatgcagttttctggtgggcccccaaaaagggtaaaaaagagtttattttaattttttaccctttttttatgttcacgttatttctgtgattttggtttcgtaacgttcgtaattttctgtgtgtttaaattttattttacttttttgagattgattagtaaattcttcttctttttacagtttgaattgttttatagtagaaagtgaaatataagatggtcaattatatcatgtttcagtttcatatataggaacttttcaattttaaggaaatttcaaagtttaaaaggaattgttttcgtgagagttaagaaaatattaaaagaggattcgtgagagttaagaaaagaaagtaaattgagaagatatatgctcctaataaaacaaagaggatttctacttcctacgagtcactcacgtatataaaataggtatgcaattgatattatttcatattgtataattatgtgacacttatctcatcttaatttgtttattttggaataagcatgttgcgtaataacacgtgttagatagacattggcaaatttgtatacgtgtgtgttacgggagcattggctatcatcacaaacgggaaaaacttggatttgaagggtataaaacgacatgtgcctaacacagtacacctgcaaaaacattgtagcaaatttttttttaaaaacatatattagtggtaattgataatttgacctttatttatcaatacagaaatattgtttttcgaaaattatttggatcacaagtagtcttaggtagatatggataaacatgttggattcttttggagttttgggtctagtttagcttaaattaataatattcgagaacgcatatcgaacttatataagaataatctgaccgttaatagcacacctaatctgtttttctaggtttcttgtcaactgtgaagacgcagatttctatttctagctatcacgaagagttcaagagtttcaagtactgtatctgtagtttatttctcgtttatgttttgtttattgtctaaaagttctacatctcttaattaatttgtatttacatcggttaacaatcgtgtacccataatttttattatgccaaaatatgttacgtcagacgaactgtttctagtatacagatatggtcacatgaatcaaggtactggacatgaaacttacgatctaaatatgtaatatatggtacgttagacttagcgattagtaaagacgataaatgaaacacatataattagcaacagctagcatatgaagataagtaaagtacatggtcatgcttctttcgtatcgtttaatttgttgttattgaatctccacctaacctagttagcaatcatctatagctatgccatagtaaaagctagctaatattagtacggataacatacatgtttatattgaaaaagtgaggtttataatttttcaaattaacagctcttaagattcaaaataatgacaaatatgttatgtctaaaaaattgtttgatcctacgtacgtgtaagccaaaaatcccgttgacttttcattgacatgtttaatcggtgtagccaaaatcaaagcgtccaagaattttagatcaatttttttatgttcggtgtgcacagtcgtaagtcgtaacaaccatttttggctactttacatccaaagcattatgtagtagtgcgaaatatacgatcgaaataggtcttactttgatgataataaattttacataaatgaatatatgtaacaccatcatctgtattggtgggatgattgaatgaatattttttatgcggaagtcgtgcatggtacattgttacgagctgtatttgacaaagaatcctatatatgtatgcaaaaaaaactgttagacttaatggtggaagtattgaataatgtggactggcaagtggcaacataccatatatataaaagaatattaaactataacaattttaatgttatcatctcatgtggtccctaaaggggttgtgaattgtgatggcattaccaacaaaaaaagaaaaacaaatcatgaatcattgcatggggtaagtacgaaaagtgtgataaaaaaatctcattcacatatatttcataatattttgtctttgagcaaactatataacattagtttcaagaaataaagcattggtcgtgaatagtatttattttacttttcgagggactatggatgatgagatcaaaaactcagaatgctaattaagtttgtaaaaacaaatatcaagatcaaatttggtcatgccatagccctttttagactcgtcaaaacatgtcattttattttattttgtatttcgtggttagttgcagattaaacaaggttgcaaaaagtagtgaatatagtctagtggtttcgtcatatcgaagtcgggaggtgtgaaattgtttctagtggatacgcacacctgacttaattattatatatgttttctgtcatatatttcataaaagtggcctgagttttggcataacacgctaaacaatttattttacgtcggcagaaacttgaaagcggagagtttggttgttcgaagaagagtgtataaactatacaacaaattcttcagcataataattgaatcttcatcacaaaaaggtgcttgattacacttgtaattgggtacatatatggtccatccgatcaacataattatgtcctttgtggcacttttatcagtttatggcatttaaaaaaaaaaaacgcaccaaccgaaaaatgtcatactattaataaatatatatttaagaattaaaagtcacgagttctatagcaaaactatcgtgaattcttagtcatctttagcttattgcttttggacaacaaatccacttatgttatgacacatacacacacaacgttgcaaaaagatggtcgcaaaggagattctccatatgcggaaagagtcagatcatttatttcctaatccattttaacaatagttaattaaaaatcaagttaagctaactcttcatgtttattgattgtaaagactaaaagagtgtttgtttctactttctaggcagacgaagtcacagcaccaaaacaaggtctggaaaccaaaccattgaaagattgaaacttaggaaaccaaggcctacttatttgagaaataaaggcccaattggcccagttctattattaacacagataaaaagaatagtgtggagaaaagtatcataatttttttttttttattatgatggcccaatcagcccaagtctgtataatgcatgttattagaaagaaagaaaaagattatattttgttgttgttgttgttgttgtcgttgtaagcttgtaattagattttattgatcaaagaacaaaataaatctttttaatatagactgtaattggttgtatattatgtctatactaatatactgttttttgctcacatatgtatacagtttttcatttctacagtagaaatgctttaattttgtttttattacttaaaccagtcgacatatggtaatttttggtgtcaactctgatagttgtcaaaatgaaaaaaggcaaaaaaacaaaacaaaaaactgatcttcgcaaacctatgaaggagttttggcatttttaattttttctgcattaagaaaaaaatattgatacttgagacttttttttcttcaaatttccaagtatttgcctcaactcaaaggacctcaaaggtctaaaaagaaacggtagggtcaagttcaatacacaaattcacaatcgaattcaaatatattgaaaataaaatgagaccaaaaaggccggtcattttcaaacaattgcagagtacaaatattttatgttaataagatgttttttcttgggcattacaaactttattttgttgataaaataacaacaaacaaaacaacaccaattgattaatacataaagtttgatgggaaatggatgaaccaagtgattaagatctgtccacgcgggaagtgttggattcatatgattcacagtttccctatcaaccactgaaaaccatattgcttcatcaatctcactacgtgggttttttattgcctttctctcatttgcattttgagcccaaccaagtctatttattaatcactttttttgtcgatatttattaatcacttttctctcatctataaaccactttgtagttatatttttttttgtcgtaaaaaaaaaaaatagcaaacaatgattgatgaaaattgtcccaaacaaaaaaaaagaggattgacgataataaagatgcaaaaacagctttctatttctgtcagcatataaggattttatagaattcaaacttatatttctacactaagaaattaaagacttataggtgtaatctattacttcacagttcacacttttgatttcttatgggaatgtgttttcgtaaagggcaatatggttttaggcattcatgtgttttggatgagacgctactaccaaaagaatatgtcgttactaaaaaactatatttttgacacatgctgttaattttggatacatagaaggtctaagagattaataggaatcgtttttatctagtttctaatttagttcaaacgttgactactccaaattttcgttgtagagttatttattgaaatagtcatcgattttaaattgggtaatactatatccgatcgaactttaatatgaaatatgaattatgctacttatgagatgcgataacaaatttctatagtttagcgatcttttgttcatgttatttagagtttggatttaaaaaagttatgaaacaaagacacgtgtgttgacgggttgtggtgtttgatttgccttgctttctttcttctttgtgatgaagaatctctttggagatccaatatattgtttttggaagtatcacgacggtgacatgtataggtcgatcgaggaaacgccaatgataaccaaattgaggctgtcgcaactaaatgatcagtcgatagtcattattaatagtatagttcgattaaaaaaaaactttccaagattattgttaccttgtattttttttgaacattttctaaaaatgatatcttctaaacttagataattcaacctatttgtggtatcattaatttgaacaactttgacatgcaagtggttggccatactccatactacaagtctacaacatgtctgcgctaggaactttcttactatacttcatttttagaccattaatgttattgcttggtcttttaaaatgatagtaaattattattttatagtatctatcgtatattattatttacatcgatcataaagtgctggtttacaaaaaatatttttaaaaagaaagagtcaaagttccttccatatttgaccaaccaagcttgaccgactcgattcaatgggtccaaagtcatagtggtcgaggtaattggtcaatcaaaacaccacgggctatatgaatctcgcttaattgctaacacgacgtattgacaaattttccattcgtaatggtgcaactattcaaaaacaacaaatacttgattttattttgaattttattagtgtttgccaaatgattttagtccaccaactaaaaaatatagaaggagcaatagcatgccgctaacaagaaaaaaatagacatcttacaaaaaaatgttttttggtttgaccttagaataaatgtatttagttagcaattctaatttaattaaaaaaaacaacgaaattatcaatatacaaaatacaaataatgctacataattcgcttaagaagaattcaactattttattttacccaaacaagttaattcttacttttttctattttgctcttaatttcccattctgattaagaaacaaatctcatatacttttctatttttgttagacatgaatttcaaatatatatcttacatttataaaattaattttcaatcaaaaatcttgtagtattatacaaccgtgatgttcctaaaaaatacctgtcatacagctgttatgcttcttaaaataagataaaattatatttactgtattaagctagattgtcaaaaattaaacagcaagataataacgtaattaaccatcgttaatatcaaacgcgttaggtcggtttgaccggtctggtttggtgagcgctggtaataatttcaccatcccaatcaatcacagacaaaattgaaaaccccaattaataatacataaaatgaaaaacatgatgaattataaattaaaactctgttctgtctcaaaaaactcaaaaggagtctctctctcacctacaccacacctaaccaaaccccctacgattcacacagagagagatcttcttcttccttcttcttccttcttctttcttcttctttcttcttctagctacaacatctacaacgccatgtcctcttcttcttcttcgtcaacctccatgatcgatctcatggcagcaatcatcaaaggagagcctgtaattgtctccgacccagctaatgcctccgcttacgagtccgtagctgctgaattatcctctatgcttatagagaatcgtcaattcgccatgattgttaccacttccattgctgttcttattggttgcatcgttatgctcgtttggaggagatccggttctgggaattcaaaacgtgtcgagcctcttaagcctttggttattaagcctcgtgaggaagagattgatgatgggcgtaagaaagttaccatctttttcggtacacaaactggtactgctgaaggttttgcaaaggtgaggactttgtgttttggtttgttctgatttcgaatgatgaagttgaatttgaatcagtttgatgtttttgaaatttgcaggctttaggagaagaagctaaagcaagatatgaaaagaccagattcaaaatcgttgatttggtatttattttgttccatcaactttttagataaagtttgatgctttaagtataatctgattctgagtttattaacaggatgattacgcggctgatgatgatgagtatgaggagaaattgaagaaagaggatgtggctttcttcttcttagccacgttagttttcttagctgatcttttgtttgggatcggtataagtattaaatttgatttgttcttgtggctgacttggttttactatctggaatctggatgtagatatggagatggtgagcctaccgacaatgcagcgagattctacaaatggttcaccgaggttagtctttttttttggcttggctcaactagttgttgtaacgtgtgttgtttttgttttcttgtttctgaagttgtaaacatgtgtttacaggggaatgacagaggagaatggcttaagaacttgaagtatggagtgtttggattaggaaacagacaatatgagcattttaataaggtttataaatgaaatctttattccccttttcttaatggttttgctcttgtcactattatggtctccttccaattactttggaccgagctaatatgcagatttgttttgtaaattttgggttgcaggttgccaaagttgtagatgacattcttgtcgaacaaggtttgttttgtttctttctttctttctttctttcatcatccgttttggatcgctctgatccggtcttaatgtgttgtattttggtttctaacttcattgagtgggttgttcaggtgcacagcgtcttgtacaagttggtcttggagatgatgaccagtgtattgaagatgactttaccgcttggtattttacatttccacttctcgtggcttatcgtgtacaatgctgttttggtcatttgttttttggggggctaaatttgctacctcttgcaggcgagaagcattgtggcccgagcttgatacaatactgagggaagaaggggatacagctgttgccacaccatacactgcagctgtgttagaatacagagtttctattcacgactctgaagatgccaaattcaatgatataaacatggcaaatgggaatggttacactgtgtttgatgctcaacatccttacaagtacaaaatccagccgcttcttttctttttccttataatcttgtcttgttacttgatctaatcttgctttttttggcttttaaagagcaaatgtcgctgttaaaagggagcttcatactcccgagtctgatcgttcttgtatccatttggaatttgacattgctggaagtggacttacgtgagttctactgctatatgaatatttacttaatcagagggaaatattattggagaataacatgaatgtattttttgtatcttgtctgtcaggtatgaaactggagatcatgttggtgtactttgtgataacttaagtgaaactgtagatgaagctcttagattgctggatatgtcacctgatacttatttctcacttcacgctgaaaaagaagacggcacaccaatcagcagctcactgcctcctcccttcccaccttgcaacttgagaacagcgcttacacgatatgcatgtcttttgagttctccaaagaaggttggttggattcatttaccattagactggttataatcagttttgtttctcttcatagagattcaaactcaattattttcatgtttattttcttgcagtctgctttagttgcgttggctgctcatgcatctgatcctaccgaagcagaacgattaaaacaccttgcttcacctgctggaaaggttgtggctgaaccttttgttggtttctactcttcattttccatttctttaaaatggaatctgacaatgtatattttgtgtcctttcaacaacaggatgaatattcaaagtgggtagtagagagtcaaagaagtctacttgaggtgatggccgagtttccttcagccaagccaccacttggtgtcttcttcgctggagttgctccaaggttgcagcctaggttctattcgatatcatcatcgcccaagtgagtaccttcattgtcttggtctttttgtcttcaagttgttcgcttgagacttatattgtgtttttagtgtattgagcattgtcccgtttacttgtataggattgctgaaactagaattcacgtcacatgtgcactggtttatgagaaaatgccaactggcaggattcataagggagtgtgttccacttggatgaaggtaaatataaaaaacttaaatctgatagcttcttgcaaacatattgctttggaatctttttactgtttgtgtcatttcttatccattgtcttggtgtttttgctgggtactgattttttgcatcgtaatcacagaatgctgtgccttacgagaagagtgaaaactgttcctcggcgccgatatttgttaggcaatccaacttcaagcttccttctgattctaaggtaccgatcatcatgatcggtccagggactggattagctccattcagaggattccttcaggaaagactagcgttggtagaatctggtgttgaacttgggccatcagttttgttctttggatgcagaaaccgtagaatggtaataaagccattactcaaaactcaaacctttcattggttttgtccagtttctaatcatatcttctcatatatgtaggatttcatctacgaggaagagctccagcgatttgttgagagtggtgctctcgcagagctaagtgtcgccttctctcgtgaaggacccaccaaagaatacgtacagcacaagatgatggacaaggtatgagcttatagaaacccaaaactcagatcttcatatagattcaaattcagattcttgagctgacaatctttctgcaatgcaggcttctgatatctggaatatgatctctcaaggagcttatttatatgtttgtggtgacgccaaaggcatggcaagagatgttcacagatctctccacacaatagctcaagaacaggtatgtcttgttgagatcaatctagcattatcattgtccgtatcacaaaccgactctaatgagtttatttctgtctgtcttgttttcaggggtcaatggattcaactaaagcagagggcttcgtgaagaatctgcaaacgagtggaagatatcttagagatgtatggtaacgaaactattgaagccacacactcactgtgtacttatatttatatatatacggcacagaaattgccacattatgatgatcattaagtttgtgatcgcaagaagaaaggaactcctttttttttccatttttaatttcttttcatatattttgacaactctatttttttaactcttgttatatatcccccacccaatagtaagaaaaaatgcataagatgttatggggtatttgtgaacaattatgttatatacaaagtcagtacctttagtatgaattctttatgtagcactttcaccaaagtccccattttgggacaaatacaaattctttgtttatgcctcaataatcattttcactactctgattgtctccataactctaagaccaaaattttggaccaaaaaaacaagaataaaaaataaaagaccaacaaattgttgaccaaaaagaattgaaaaaatttatgaaatttctttgccataattacataactaggtaagtttgcaaatgataatgaattagaattatttaggttaaatgaccatgctttttactaaaaactaagtaggccactctcggttcaaaatgaacgagagtgttagctcgacattttgtgttatccttactttcgcatgtcatagtaacataatttttgtgtttgtcaaaacaagccagtacaaataaactcgcaacttaagttatcaagtctagtattaatttgccaacactctagttgattaagaaccaaaaaggtgatagataagtcgatgtgcgttggatgcaagagtcaaatgattaataatggtagagagaaataaaaagccatattcgcaaccttctagctcattcggaagtgttttttggtggttgagaatattattctaagaaaattgaaaatgaggaatggaccgatgggtttggtgggtaggcgagagagcatatagtttagatttaacttagcacacgtgacttacattgaagcgtgccaaaataagtaggtggacagaaaactttccaacaacaacaacaacaacatgtttctttcctctttcaactacttttgtgttgtgtgtttcttctctcgacctcataaatttgtattcgttaactagaagtgaatacgattgcataaacgacaatataccccgtctagtttaataggaaccgatcgtcgactttaaattgacatggtactgcatgttttatcattattttgttgattttattcatcaaatctagtgatggtttaatctggtatattttgtattacttgttccatcttccagggacaaacttagtaattttcttttaaaattgattcttcagtacctttaaattgtaaagctacatagtatgttgtactttttatttgtcaacatggaaaataactaaagatgatcggtgtcaaatgtaaataaaaatcaagttgacatggtagtgtaaatgatgtcacatgattgaataattgatttctcagtatttcacatgttttgtcaacgtcatagcagaacaaaataaataaggaatattgacttaaggtcactatattaacttttaaccgtattttttttatcaacaaaccgtaagtctactgattttttttattaaggtttgaactcaaactatttttcttatcttggccttttcaaataactagactcgaattttaccgtagaactatttttgttagtttttcaattgatgagttaagactaagaagaagtatattcaaattgtcatctccattaccgcaaaggttgtcccaatattgctaccacttcatgggctggatgtaaatttagtagcgctgattgtagtttgcggactcattagtaagatttctgagaagggccaatataggactattacagcccattagtagtccaacttcttaatcatagacccaatgcataaagcccgattaagtacatggttaacttattcccgattaagtacatggttgtctttatatcctattttaaaacaatttcagcaaaaaacttatttttctggaatacgctaatcattaatcaatatagcatacatactaataagttagactaaataatattatttatcatttaagctaggacgcatgattgatccgattaatctgaaaactgattgcttggaacgatatattatgtttggtaattgcttggtacattatattatgtttgaaaattatttttaaaaagagtgaaatctctcgaattcttttattttgcgggtacatacttatggcttaaatttggtaaacaaaagaatctcaatgttgctacttgctaccacttgatgggctataaatttaggcccaataaaaatggttaaaaaaagaattgactaagaaccggcaagaagaatggtttctcataagaaaaagggcttgttagttttttaaggtatgaatatgatcaacaaactcttaagattcaacaacatcacactaagattaaagtgctcacagaatacaaaaattaaaacacacagacttgcaatttctaagtactcaatacaggttagtcttgatcagcgtcttcaagctcttcatcttctggcacaccacggacatacaaaacattgttgcacctatgtacacaaaagtcagcaaattaattcaatggatccgaaaatttcgaagcaattacaaacctgatagttagtcaatgaatccactactatcagagagaaaatgataaatgtgtgctaataatggccgccaagtctaattcttaagttttatcaagtaatgacacttcactgtgaatcatatagttggaaacataaactgaatcacaaggagaaaataagtagagacaatgaagtaatattattacctgatcaagatctctccaaggttccctgtcaattgtccatcaatatattcttcggtgtttcccagctgacaaaaacaatatggaaaatgtcaatgcataacaatctatgtatctgtacagattatcagcattgcctctaaacttgtatgcacaaggaacatttagcaggtggttttggacaaaataacatcaatctctctgtttaatcaaaaagctatcttatctaactttgtaattcaggaaataacgcacctgcaagttcatgtaggagtcaacagaggcgagaaaacctgtgaagtagaaggaagactgttagctatataagctctggatacttatcatcaaaagcattttgaagaaaaatatacctttgtattccattccccatttaagcttgacgataacagtcttgccggtcaagttgttcaagaatggtttcgggttaaccggaatagtctgcaaaacacacatacatacaaacttggttcatcaaatactaatggaatgaactcaaaagcatcacatttgaagataaacacattgtgcattttccaacgaattctcgaatgcaatttttatgtagtggactattatactcgttaacgacatatatataacaatttcgaatcagattcagattcgcagatactccaatcttttacttgtaatcagataaatcgacgagattggagctgaaagaagagctcaggccatcgaatttcgcaatccctaaaactacttaacagataaaattctaattttgagctcaataaagaaaggaattaactaatctaagctcgaacttagaatcagaagacgaaaaaatcgaaacttaccgccatgagtttgagaacgaagagacgaaacgaagatctgggagaacaaatatcgatacgcttgtggtttctctcgatttagggtttttggctgggtttattcgttgctgtacagaagataatgggcctgcgaaaatatctcataaggcccattattggttcaactggcttgctttgtgaaatctccataaaagtgaaaacaaataatacatgacaaaaacgacatgcattccaacctaatgacataaaaccggcaagaagaatggtttctcgagaacaaaagtccattatattgcattcatctttacacaatgatcaaattttgtcagcttgcctttaaaacaattagccggctttctactctttgaccatccaattattagtttagattatatataattccattagaattctataattattacatcaaaactaaaacgattggcatcacatatatgaccaaagaattaggtgaacgtgaaccactcatctgttgaggtcatccatcatctagtgcaaagtatttttcatttttgaggtcttttcatttttattttttttacaagtcattatatgtttactttttttttcacgtcattatatgtttactatgataaagaaaacgcttataaaatcagcatgctaatagaaaaggttatctacatcatgatttttattttttgaacaaaaaaacatttgaagtgaactgctatagatgtgaatcatcttacttttttgcgtttaaaggcaaaatagtaacatcgcaccatatgaaattgttataaaaagggaaaacaaatcaaactttgtagtcaagcaatgtatatgaataacctacttatgacttgtgccttgcagcgtaagttgatgtacgttgaaaacgaaaaaacaaagtggatagtttgtaattgtggctctaattcctttagtttttttttctctaacaattgagtttctttaatcactacacttccacttcctcgatttaatatacctaaactataattggatagttgaaaatatcaaaaactatagtctagaatataattataatcatcgttttaatgtttgtaataaccgaaaggtccgaaacgaaatgttagcagccaggcgaaagtcattttctcagctgacctcagttacgcgcaacaattcatacctcagcacttattttttatacttttgtcacaatgtcttagtcttcttctgaattagtctcgactatcttttttcacaatcaatatgcttcatacagtttgtttgtgtgtaaacttgctccttcgaaaatatacctaaagaaaattgtctaaacatttttagattgtgtttcgctaattcttatatatatttatatagaagtggtgacatgtcgaatctatattttatacaataccatcagttagctttttgcacagtctttttattttaccggttgggtgtacaaatctatgcaaatttgtgtgatcgtggtacatttatgtacatatgtataaacatatagtctttgacaaagaatttaaaaaatataggcatttcaatcaaagttttacatcatgaagaaatgtaaatctcaaattttcaaacattattaatttgtgtttgaataattctatctctatcattcttgaccatgcttttgaataactaaattttctaagctgaaaaatcggaaagattcatgaataaatgatcaatgctatatatgaagactagagttacttgtcttatctttcttgtcgttaaaactatatatgaaaactagagttagttaatattaatagacactttgtgtggttaaataataaataataagtaagatttgctatctttcttgtcattaaaattgtattattgttattaccaacataatatgtcatatatcgacctgaaataattaaatcatgagaaatttggcaaacggaaacttcggatggtcaacaatctacaaatatatgcatgtatataaatacacctaaagaattctaacccgtaaaacaaaatagtttccactttaagttctgtaaaagtatttgacccctctagagaccatgtatatatatggtgacaaaaattaatactttcaatatcttcattgtcttctctctctctctccctaaaaaacatggaaactacaaaaaacactaatctccaaaaccctactaaactcccaaaaccatttcaacatcacctagaagaagaaaaagaagacgcactatctctccgagatcttcccctcaaagccaagaatcctaatcccaccaccaccgaagaccacaaagaaccgtcaacggaactttttgagtttctaacctcatcctcctacgacgtagctccggcagaaaatataatctttggcgggaaactcatccctttaaactaccaaaatgctttcttttcacctcctgagcacattagccgtcgaatccgttcacggtctgagtccttatccgcgatacaaggccataagcttaaccgtcccggtagttgtaccgtggcacgtcgtgacaatgcgggacctatgagggcaagccgctctttagattatcgtaagctttcacgtggtctaaccaccgtacattctccaccggaaaatagttcatcgactaaaaacacggggaagcctgaaacaacgtcttcgggaagtgtaaaaagtgtaaggccaagatggtatgtgatcatgtttggaatggttaagtttccgccggagatcgaactcaaggatataaagagccgtcagattcgccggaatattccaccggttatgtttccatctcctgctaacaggagagctcgtggatctcggtcgccatcaccgtcaccttcttggaggtttctcaacgctttaagttgcaagaagcccacaagcgtggctgctacggcgccgttttgggttcctcatccataaattactatattattcctacgaacattgtgcgcggttacttgctctgccgttgattaagaaggataggatcgtcatttagtataagaaatatcgatattgttaatttattttgtgaaagaatgtcgaaattgtaatttatttggtgaatcgataatagtttggaccataacacatcttattcacacctttttctttttctttgattttttcgttattttgtatttcagctcatttagaatatttcaatatatattttaataaaattgtttttgaaattgaattggttaggtgaggaatgaatgatgatcaaaagaagcacgagaaggatatgagaaaaatttattaccttacttttcccaatgggactagtcgatttttaatgatttagacaggaagttgtatcattttttagcatttatctgtgcttcgaagttcatggttgataaatggtatgatcaaattccatcttgagagactgtgacatgcacctttcttttgtccagagacttctagattcgaaaattattagacatttttctttcttcataaatctttttcaccattatcatatgtctatatgatacgacctaatattaagattttttacttagcttagaattgacctaaattggtacttttgggctgtgacactattagtgatgaaagaaattgagacgtcaactataatgcgcattttaaaagaaagtaagacaatgattggaacaaatgacttgccaagtaagtgaaagaggacaaagaatgttttgttccaaaacaaatatctgagagacaaacaaacactggagatatcattgagcacaaacacgcattggtttcctttaggtacacgtctaaagtttaacgaaacgtcgtagcttcaagttttacaaattgatcttacaaatttacaggttcctatatgttccctgaggattaagagagagtaataaatcaggctttgtccttcatttgaatcttgacaaagtcttttaatctctcctccttccctcgaaggatgttgaatcatgtagcatctaacgagtgtgtaacccaatacgcaagaatctgtgaaaaaacctgcaagatacacgaaaaggatgtaatgtttaaagattgttttagaaaacttggagttctgatttagaatctaaaatatcatttacctgtcaatgtttcttgagagtttctgaaaccgcggttttaagttctcaagatgaatactgcaagggtataaacaaggaatttgattcagttatagagagtagagactgtcatggaacagtggtgtgacataactcatgagaaccaagagaaggactcacatagaagaatcaagattagcgttaaggaaagaatgagcttaatagggcggctcaatggaacgcgaaatcgtctttgataaaccttgactctgtcaaagagctgcaaaatgataaacaactaagacttatgatcctttctaatagtgtagagatgatccaaactgcagaagcttacctggttataatcacgacatctctgcagccaaaacataggtttagctcctttctctttaggagtgtcttcaatatgtgataggaacttctccctctcttcttcttttgcattaacagggacattaatcctcaacgcactgatatttggtacatttggtgaactccatgttcttcttgtaccgccttttttatctgcactttccggacttcctatgtcgtcaatgtctatcacacaatcaggactgtcgccataacatctaccctctcttctgccattgatcccacgtggattctcagctacagaactcgttgaggaatctctcaagttgatgctatcactgtttaaactctctgacgtctgagaagatccagatagaaacatggcgagatcatcacgctcttctttgttaagatccacccaacgcaaaggttgtttcccattctcgcttaacgactctagcagagtagattccacttgataaatctggttttcaatagcggtaacaaactgtttatgcctagttaaggtagtgtcatctcgacaatttccatggcttaagctcactgccctctcaaactcttccaactgattcaagtcacaacaatataaccaatatcactaacacactcatgagtaaccatgaaaaaaaaagggaatgatcaaaggaccattgattgtttcatacctgccatttagcagtgctcaaagcagcttggagttctttgcagagctcgtctgattctacggatactcgaccgtctctcttctctttaaaccacaacctatacgcagattccattctggaaatacaacacaaataagaaacaaaatttcaaatttgataactcaattccttcacaaaacacaaaggttctcacttagaccattctagagccaattagtcccctaaacaatcgaaataccctatttttcaattgaaattccgaattccaccatcacaagcaacatgagtcaattaaacaaacagagaatcaaaaaacacatacatatcagcagattcttgaacctcctcagctgcagagaaaaaaacatccttttgccatagatcgaaactattcgctaccatcatcttcgaaaccacacctaaacccttcaaattaaagaccaaaaaatcaacccgaaaagattcgtcggaatagattctctctccgattataatccaaaattagattctgcttccttctcttctcttctcttctcttccttttttgccttcaggaggaaagaaggaatttttattttttcttcctccagctttctgtttttattttttattccttaaattcttcgatatttctttgctttcttcactttaaacgttaatggaagattttaataaagaggcctctctgaactaaattgaccatatttcacacgtgttttattgtaattgggaaataatttaaagtaagatggtcttagctgcaggagattaccgcttgtcaaagaaaaacatcaagaatgtccgtgttgttgttgggcctaccggtttgccgcaacatcaattgttcgccaaccgcattatattattattattattctttattttaatactctctatacaagtcaaatgctaatgagtaaataaattcaataaaaactcaacgctaattttaacttttagtttagtaatagacagtaggagcaggacaaattgaggtggcatgtgtagcgcatgtgatatcaaaattttaactagttaaattgaaattcataaaatgaaaacatgttttggtgttttcagttttggagagacatgttttgttaaataaatttaattaattagttgttgtgatatggtgaaataccaccttcttcaacaaatcccaaccttgattttggtgttttcagttttaattagttaccaagacctgtttttgttcttatttagacattaaccggtggtagattctagagattgggcccataatatatatatatattttttttgatcaaaaagattgggcccataatataaaacaacttttttctgatgcaaatctctttgggtaggattgggcttcactactacaatatgtcaaaaatcagcggtcaatattatatttagaaaaaaaaaaagaacggatggatttttcaggtcacttctagtttgaagtcaagtgtttgatgtgatgattctttaaatgtcacttctcgagtaaattgttttcttgaactataaattttgaaatttacaggtttcacatataacctgtataaaaaagggtgtgacactaaccaatttacaacacccaaagtccaaacgccaattctcttttatctcttcaaaacaaacgtaaccgacacgaaaatttgagacaacatatacaacaacaaagtggcaatttctgcagcattagtagatacaaaagccagtttagtctcaactctcatgtagcaaatctcagaaggttaactttggacagtgcctacttttgacttaagagtaaaccaaaatggataacgttatattatatggtaactaatcatatattataataattttgactaaacaaaacggataattaaaaacacacaagaaccaccattagatgatgatcctaggataaacagtctcttatcattcacttctccttctcatcttcttcttcttcctcctctcgaaacccacaaacctctctgtttcttctattaggactatccaaagctctcttctcttgttcttcctctgcttcttcttcttcttcttgaccttcctgtttcttcttcttcaatccaacactcttccttctcttcacaactctctccttcaacacactcacaatctccctcaccgccttctccgcatcactcctattcctaatcaacacttcactaacatcagccggagtaatctctgcttcctccacacattcttccatctccttcaaaacaacactatccatatcttcttcctcaagcctcagataattcttcaacagaatcttcaaagccggaaacttacaaaaacccatgtgaacatgcatatccatcctcccacttctcatcagagcagaatctaacttctctatatgatttgtcgtgaacacaaatatcttctcactcccacaacaagaccaaagcccatctgtgaagttcaatagccccgacagagtcaccgagcttcccggttcctccaaacccgacccgtttgtcaaacctggatcatattcatagctcccattcttctttttgttctttcctcgtttcgtcaaactgatagaacaatcaatgtcttcgatgacaatgatagacttagagctagtcttcatcaacagcttcctcaattcagagttgttctgaacctcagtgagttcaagatcgtaaatatcgtaaccaaggtaattcgccattgcagcaatcaaactcgatttgccagttccaggtggtccatacaacaagtaacctcgtttccaagctcttcccgttttctgataaaacccttgtccgttcgcaaactcccttagatcctccatgattcgcttcttcttctcaggatccatagccagagtatcgaacgtgcttggatgcttgaatcttacagaatcccatggatggctcctcgcgtcgagcgaaacacctcttgagttcgtgtaaagcagtctctcctcgtttctccgacgaatctcctctgattttccgacaatgtaatcaaggtaagaatctaggacaagggctttgtctcttttgttgatctgtaacgtaaaccctcgtttctcttccggcattggtctccacgaaaagctctgtacttgacgttgtacaacgacgtgttcccagaggatagtgacgccgttaaatacgtcggtgattctgtcgttgttggagaggccgaaagtaacggagcttgagttaggaacacgtgtcaagctgagacgtgtgttgttgttgctgctagaaactgcgtcgttgacggtgacggaagagctgaggtaaagctgaacggcgttgtagagctcgttggtgttgacgccgtcaatctccgttatgtcgaagtagatgtgagaagagaacacgtggcggatacgtgtcaagaagtggaggaaagctagtcggagttcaggcggaaacacgagttggacgattgtttgacaaaaggctaacatgccaagtagagaagccattgttgtccaataatcactcattttcattttcttactctgtttcttttccctttgaataaaaaaaaaaattgggtagagaattagagaaattgagaagtgggtttgtggttaaatgaggagagaagagtaggtttagtgtaattatggagataagagtgtgattttttgaagttattattctagagatttgggagggaaaatgtttggttgaggcttttgggagaagagaaagagtgacgttggtggaatttattgaaataatgaaataagggatcacctcaatttataagcaattggaggagtcgaggagacattttactttgttattttactaaagaaaatattgttttgatatttgcggatatgaccatttattttgttgtgtattgtgtattgtacaaattatatgagcaactagtactcaattatttcataggtctatggtttctaggcttacaaaaaacaaattacaagttatcgattgaatgggactgccaagaggtaatggttatgtgacatgtaaatctcacatcggatactattcgactttttcttttgtccaacaaaatgataaagatgaaaatatgaaattacttttaaattttttgtgagcaaaaggttgaaacttgaatggtgaagaatgatgaaaagagaatataaaggacggtaccaaagaaatggataggtttttactcttacgctaattgaatcggacaaacaagtacaataagaaaaacaccacaaacgacaagaaatagttaaaattaaaaaattacataccaaaagagggtaagttcttacgagacagccaataacagatcattagctggattggttcaatgtagtaagaggttttgttttattgattggttctagtgttcaaagggggctctaaaaattcctttgtgtatacttgtggtttctattggttactacagaaaacttgatcagtaaaagcatcattatcaatggtttcttaaaaagtttataaaatctcttaaaaaattatataaaacaaaataagaataaaaatattaaaaaaagttcttagaaagtaaaattggctcttaattaagagttttttttatactttctctcatcttactaagaaccctctaattttaaattattatttggtagatcaaaaatgtgaagatttgatctaagaacccatcaataaggatggtctaaagaacgagttattttgctattatgttttttcttaatacctcttactttttgtcgttgttacaagtattcattttttaaccgaaaaatagcatcaaattgattttttttttaatcttatgcaacattttgttttgtgttttgtatttggttttacaatttacgaataatatttgatgaaacaagtagagtatttttcttattaaacccaaattattttaatggctaaacgcaaaattttacatttaacatgtaaaaatcctaacctcagctacaaagaaaaatactattactaagcgtaatgatctttaagtaatgatgccaaattttaaattatggttcggtcatccacggtattattggaactcgcccggatagaatttagaagaaggtttttcttatttaagattagtgcaaaggataatgatcagtgtaaatttgtaacgtagtagtagtctctttagattgataagtaaaatattaaagcaaaagggaacatgagggtctagattagggtttgtgaatgtgacttacagttgggtttgtgttgttttgttgagactttgtgattttattcttaaggacactcgaatttaagtgggacaccattgtttgtctacatttgcatatcaacatctatcaccataatactcaaaactctctcaactttctttcacatctccatctaattccaacattaataaacctcatcacaaccccaaattagtttaaaacacttttaaagataatagatatatctgttgaactccgagatcaatgggtataaactataaagcttgaattgttttcatataacatttctttttgagaattgatagatggtatttggaagaccttgccaatatgaaacttgctcgtctaagatgagcctttgatctaactagtctctaattctcaatcatatactgtatcttataagttgagccaaattatctcatacatattattattattattattatttgagaaagggctaatttcacacatatagtcgatcgtatgatgagaatggaaaacaaataagagaataattcgatgtttcattttgccgacaaaataaataattatttgacgtttttcagatgttttaaatagggggaaattggtgagatatgtaaaaggagatgacacataatgacaacgacagtagataaggcccaagttactagagtcacttttgcagaactgtagaatctcccaacacccaaaacctttaatgtattactgtgtgtagattcaagcttaaggtatgctaagttgaattaactaaaattggtttatatattgatgcacaaaaatgaaacaaaattgaaaattatgtaggatttgaaaataattaggtatttacaagaccattggttgatattgtgggggaaaattttggaccaaagattctgtgcagagatccgttggtgattcttgtcttggagttttgtatcctctggttccgagctaaacccaaaagggccaacaataaataaccaatattaaatgtcaaaagttgtaaggctatattattatgttatgttacaaaagcctcctcaagtacacaattggcattttatactattagggtttgtaatgatggtaccttctgaaactgactctctttggcattttctatttcagtttttcaaaaattgaaaaagaatcattcacttcactattaacaagacaatctattctcttcttcatttttttttgttattcattcaaacatgatgaaaatgatgatccttggcctttacgcaactttcatttgggcattataagaaagtattaagtactattacaattggtgtctttgagagaatagtcacatatcacctgaagaggtaaaaatgatctaaaaagagtaataaagagatgacgtagtacacaagcaagctctgtcttcttcttacattatcacttcgagagacacaccccacactctgccacactcgttcccccaaaaaattacttactactaccaaacaaaatttaacaacttgaaaagacaaaaaattaataaataattgatggttgtgtggcacagaagctataatctctgaaattaaatgcaacagagagaataagatttcatgcagttttctttaataagttcctttgcctaattagatatcacatgaaacattgttttttttttgttcactaaattttctttggaacttgaatttgtcatatttttttgtttggccaaataatgtcatggacttttaaacaaatccacagcttgactttgtaaacacccaaattcgaatctcctttttgtaagatttgatcgtctttttgttaaaggattatatggtagattcttttagcaagagcttctcgatattgatgattggtcactcacttgcatgaccaaattaaaacaacgattaccaaaagcaaatcagattagagttttaattggatgatcatggaaatgcttattgtgtgtattttcatacaaactagtttattggtaaatccctataattataagaataatagtatctaatggctatttctgtaaattttcgctacaaattactcaagattagtgatatataccaaaaacgagaacacatagtagtagaaaaccaaaaaatatgaagtactgcacagattaaagctacgagcatcaaggtcttgatattatatatacgtttccaaaaaagaaccgtaagtttcatacacaaagcaaaaccatatagaagagtaaaatccacaggggagtttaacaaaaaagcgtcaaagaacatattatacatatgatctcattagaactcagaatagttcgcggctggagaattctctatctactctgtaccaaatgacttcccaaactgaatcaaagaacctatctctgatttcccatttttccggatagaatcaattaatggcaatgattaagaagccaacagagacatacatgaggaagaccgggtagagtgcgagagcttttcttctcgggttcactgcggcgctcatgaaaggataagcagcccaagagctccaggcaagagtcacagacacaacgaccatcttcagtatcacattgtctttcaacatgcagatcactgctccaacgtctagcggaaatagacagtagcctagaaggcttaggctttggaaaaagattatatgtcctccctgaaatttgcattgttcacgatataatgggatgtttaaagtcaaaacttataacagaaaagtgtaaagtatgtggctagtaaccaatacatgaatcaaatgctagcttaccagaagcagcacatttagtgtgaggatcactgccccagctgcaagtagtgcaaatgccacggcaaatacttcagactgtaaatcacagagaaaacgaatgagaccaaaggataattggtaccggacaaagaacagttctttaatctagcagatatgaagaatctagtgcctttctaattcagggattcaaacgtagataactcgggatatatatgctgggaaaggtatattttagttggaaatgaaaactaggatgtggggtattccattacaatatgtggtaataacatttcgacaaattcaaagcagagcctacatacagaatcaattcgttccttttcagatacatgatctatacttcaagtgcattccaacatagaaaacaggaaaggttccattttactctttgatacccacagtttcttattaaatatgttgggaaatcgtaatatatgaaccaaaagaccgaccagtcatgccatcatccattacggttagaaaagctgtagctacatcagttcaaggtgaaagtttctaatatcataaattgtctataagatcttacacatcaaattctctacatgtaagacaattgaaaatgaatagtaagaaagcaccaaatgagtaggttgttgctcatcaaatcaactctacaagtaaaaatccgacttatgcggaagtaacaatggctgcctacggctaagagtcttaattaagagcaatgctacaaaaaccaacattctatacgaactctcaatttagccaatatgtcaacattgagtgtatatctaaattcctcatttccgggtatatggacattccaaagataaggaatgctaaaagctaagattccaagttcacaaatcgatcacacagtcgcatagccaatgtacagggttccgcatccacaaaggttccaacttccaatgaacaaagctgaaaggaagttcttaccttcttaacggaagcagaccacgaaagagtaagccccaagaacacaatgaagaaaaaaggtccccatagatcccaatccctaagtgctttcccaggatcttccctatacggattaggaaacaccacaagcttcaaattactcacgatccgtgacagatcacgcttcacagtatcccaaacaggctccgtcaatgtatttggcggagatccgaatccgctacctccaatactcttgttaccttcgttacctgctgacggaagtggtggaggagctggaacaggcatcaccttctgagtggaggaggaagacgacggtggaagcggtgggagattggattgaacgaacggtgaggatgaaacgggaatcgacggacggatcggactcggtggtcgagcaggaagcacggttccgggacctgattgaaaactgtcgttcatcatattctcaatctcgtcaatgtctgattgagatgattgataaagcggaatcgtatcgttgtgcgacattttttcttcaccggagagatattgaagattccggtgatggtttgttgatttatttttcccgggaaacggatttaggtcaaaagctttgatttgggggaaattaagattcagatctgacgaagaagagaagtcgaaattacaaagagggcgatgataaaataatattaaaataaacgtgtgacgtaatgttcttaccctaaacgacgtcgtttcataatatctcattctatgaaagcatgcgattggttaataaaattgagataaaactcaggtagagagttttttattgtaagtttttgatacattctataataaataaaatttgatattttgacctttttcaataattggatttgaaaaagaagcattcaacacgtttatcatatttcttacaatgtaagtaaattaattatgtatatatataaagcaaatgaaactatcattttttttttatgagaaaaaaagaagaagaagaagaaagaactatcattatcataaacaattttttttaacaaataaaacagggacatctttttatacatatctataagagtaaagacacatcatttcctttattggacaaagatatacaacgaaaagaatcaaaaacagaaaaagaaattctcggacataatagacaagctataaacagagcattcacaattttcacataaaagaaagagaggaagtgtagataaataaatagaatataatttgagattctatgagcttgttgtgcattccttaggagctccctgtggaaacctcctatggtcagtacaataattgtagatcatgtaattcttctgaacccatttgagtctagcttggcttgttgaatccatttcttgagtgtaccaattggagtttggtttcgagtcaatcttaatgtttctgtaagaagccatgaatggagctttagaccaatcagttttaacaagaccgcctcttgttgcccaatcgtctgcgttccataaactcgcgtacatcctcatcggcttgttctttggaaacaagacaccgagagactcatagtttttaaactctctaatgggtgtgtcatcgacggtcaatctgatagaaaacagaacagataagagatgggtaagaaaaatcgaaaacctagttagggtttattaacgtgtgtagcaagaaaggtgagattgttgtctttacatgattctttgagggttccagaggattgagtaagtgtggaaattggcggttgggtcgaaccagagatggaattgttgctctttgtcacctttaccttgagtgtaaacattagtgtgtaaagtataaggatctccactcatattacccaagaactcaaaatcaatctcatcccaagtggatccttcggattttagctgcaaatacacaaaaatgtcaagatgaagtctcaatataaaaaccaaatccaaaatcacttaaaactcctaaagaaaatatataaactcacgtaaaaagttgtgactgttcctgcagagttaccaggaacaagcttaatctgcatatcaatctttccaaacaaatactctgttttggattgaaaaccggaaccagaggatttgtctaaggagagagtaagaagctggccgttgttgagtatcttcccacggccatttccccaagctacgttgacgtcagtgttgaaatcagcagccgacactgaaaacgccgccacgagaagagtcgtgaagaagaatattttgaaaggagacattgtctttgtgtgtgtgcgtacgtgtgggtgtgttttggagagggtttggtgaggaatgtgaggaagagagaagaagggggagagatatatatagtgggagagagtttaacatataaataaatgagaagaagaagagaagagagtgggtgaacaaaaggaggctaatatcaagatattgcatgcaagatgtattacagctggactcttgagtatctccatcatttggtaagcagattatgtttaccatccttaatttttttaaatgttacagtaaatattagcatgcatgagcatattatttgttagaaatatgttgtttagctcttttgaattcgaatttgattgtcattaggggaggaattccgtattttatcataacaaaagtaaaatgattgtttggacgatactgatgaccgactaaaatattaaaattgagacagacttttttgacgtaaaccaaagaaatctctaaaattatatactgtgtttgagcaataacaaaattaaaattagactcttctattagtaaatgctaggatatactttaataatttttc

SEQ ID NO: 648 - DNA, 134784 bp, Arabidopsis thaliana
gaattcgaaagagagagagagagaacttacagtgcagcatcctttcctgaagcaaactccgagaggaggaagaaggatcgcgataatgatctcgcacagaatctcacagttgctcggcattttttcagagagatgagatgagagaagaagaagctttaagagtttttttaaaagacaaaacactgaaacttgctgtcacagagttgagagtaccaatgaagagagatcagtccacgttttattttgtttccactacaaagtcaatgtgcgagatctgcaccgttcatttattgatatttaaatcgtacggctttagattacatctcgtgaatcacaacgaacgatatggtgcacccttatcacatcagatcacttttagatattttagtctctgactcatccatgtgactaaatgggcctgggaaggcctgtctattttattaatcccgggaccagactggaattggacagaaacgttttgactcaaacggtgtcgtattactgagactttgattcctcaactcacaatcattgtcattatttgccaaagtaacagaaatctatcttttttagcataatctataccataatatatgttggcatcatacaaaatcctttcaaactcaaaaatgcttccgcattttgcgaagtttaaactccggtaaatacaatcttggcaaagaatttgatacattaactcttaggaaggtccgtagcctgactttgcaaaagccaacaagttatacatcaaaaagataagcaatgtatcaataacgcgacaatgttctcaaatcttcaatacataaaaattgcaaagcaacttattatttggtacatgataagtaaaacagtttcaacaacatattgatccgtgtaatggaccaaaacagatcaagctgagttaagtggagctccaagttcggtagagccttcacggttttgaaacacgatcacgtatagtgcataaattatccctgggatgtatcctaagattgtcagcaccaagcaaatcaagaactctacctgcaaaaaaactaagagtcagattttctaaactaaatctcaagattcatgattccaaaattccaataacttacagtgcaacagccacgtttgagacaaactccaagaggtggaagaaggatcgcgattaagatctcgcagaaaacttccatgttgctcgccattttttcagagatgtgagtgaagaagattcttgaatgtgatctgaattagtggagaagaagagaacactgaaagtagtcggtagcacagagatccaattaaaagagcaatccacggctttttatttttggcgctaccaagtcaactacgagatctgcaccgtttatttgtttggtatataaatcgtacggcttcagcttacatgccgacatctcgtaaaattaccttaccttgcccccactctttagatattttcatctcaagaacacgcaaggtatggtgcaacacaacacacctgatcattgtgggatattattactctgactcgcccccttatcgtacggttaatggatcacgtgactaagttggcctagaaggcctgtcttctattgtttccgggaccggactttgattagcccaatttttctgttgcttgcttagatggcaagctatctcagtacatttacttaacccatttccctcaatgtttatttcacttaacactatgattcagacctaaagcaatgaagaatattaatagaacacaccaaaagttgggaatttagtgacaagacaaactcacaaagaaaaagggtttcacattgttttaggaattcaaacatagataagaacagagtaaaaaatgccatagaggaagctctgagcataaaaaccggtcaacaagttgatcaaaacgtgcgtccaacaaaaaccaaacaccatcattcctctcttggattaccaggtcttggaacgcgtaaaacagcaatcggaggattgaaatccggcttaatgatctccgtcaaattcttcaagcccgacgtattagtgtttatatcacttctggtcaatgatatacatccgcgtaagtccatgtactctagattcgaacatcccttacaaaccgagtcaagtcctctagcagtcaatgtggagtatcgaatctccaaatgcttgagctgtgtcatgtatttcccaattattctagcctctatattcccatatctaggaaatgtagccagatagtctagtggcgcgacgattgttggcaggctaggacctagccggggcaacaaattccgtttcagaatctttaaattttggcaactcctccccaatgttatcagagactcgtgagttatgccataagagtagcttatatcaagttctctaagatttggacagttcatagctatcttctccattgacgcatctgtaacatttgggcagttctttatccaaagtacctctagattagggcacctgcaaatggaaaccacatgacattttattcattctatcaaaactctgcgattaacctctatggactcaagctaaaactgagaattatcacgaaaagtgatacgtacctctcggcggcgtaagatagagagcgttctgtacaatgcctgatccgaatctctgtgagacctccttcactccgatcaacaacagatcggagaaatgaatcgactttatcctcaaactcgggagtccaccagttgatcgactcagggaacgacagaaaccgagtttcgaggtcgaagatggtgtttagtgtcgggtcatagcatgcgttcatccagttcttgctgaccagcatcggtccaatccatctttgttcctggcttagccgtgagaagatgtcaagaagacattctcgagtcaactcagaccagtcagggtagagtcccgatcccatctccacctttccttccccgccgttgacttccataggattgaagaacgcttcgtcgttttgagtacgaatagacttgaaatgttgagacttttttttatcgtcaatggaataaatgtagtcaatggaaacaaaaatgctgagactttttcagcttctataatcaagcatgctctttacctattacaaaacagagcttttttttattggtcattagtaacctttccaattttgatatccagtttatattaatgttctgtcagtttgaagttggagcaaaacggttctgctcctcgactttgattaagagaatgagtaagaacatccaacaacaaatgagattccctaattaccaaattggattaaaaggataatgtagtcacttatgacaagagttattattcaaaggttttcctatgttggacatatggaagtaatgactttctaagtcatcaaatcaaatcttatatctatatacttgtataagcatatgtgcatattgggacgacaaatcattatctcaaatcctatttcatactaaacaccctaaacacttaaagccactggatcttgccatgtaaccttcctcttcactgctctatttaactctttctccacatctccgcaaatgggtaactttctttcaacatgtagatcactgatcctgttatcaagcattgcattcttcattgcttccgcgaccatatgttcaccattcacttccggctcctcttcttctctctacaaccaaaacacaaatcaaactaataaagttctatagactctaccaaaaggaagacactaaaataacacaagttgtttggctttaccgagatctggtttaggtcaaagccagggactttgtcagtgccagaagtgtttccctctccgttaaggtcaggaagtgaaacggggaatgtcaaaacatcgcttcctctgctcctttttcgcttcttatccaagtcacaacttgcaacattattagccaatgcttccttctcattgcaaattgtattcttcagtttcaaatcaaaacatggtacagatgctctcacaccagactgcttctttctttcgccacttggtttccttgggacctctaaacccccggattctgacaatctcaacatctctggagaggtttcaagagtttgatcttgcttcaagtgctcgtatctacgtctcaagaacctatcgtttgatcatcaaaaactcaataagctaatgaatgtacaaaagcttggatcatgtaagttaatacacgctaaacacgtaaattgacaagaagatcagagatcatacctaacttctgacttgagggtcaatctcttttgtttaatcatctccaatctctttctctttatctctaattcctgagaaaacgagataaggaaacaaatttcaaaactttacttcttccctatgacttcacttagaatcaagcgaacaattccaaacccaaagtcatgacaaaacatcatgatcacccaaaccagcagatccagaggaaatcgaaacaaataagaaacccagaaatttcaaacttaaaaccctaacgaaaaagcaattaccttttccaactccagaacctgcacaaaggttaatctgatcatgggatcgccaccggaagcagaggaaacgaaattagtcttcttcatcggatccgttcagtgaatttaggaatcgcagattggaaagacagcaagcaagcgagaaagagggaggtgtgaaggagaaagaaggaagcgaaggtaaaggggatgattaggttttaatggtgagagtcttattccatgtatgaaaccctctgaccaaaagacttaagaaaccacataattgattgattttcctttgggtgcccattacaaacaaaattgatattgaaaaaattaaaaattttggattttccttttctcttctttttgtgtgtgagaagtctatgagacaagtagcagaaaactaggactagtgatcaaagatggtaaagagaggaaagaaagaaagaaaaagttttgattttttctcatttctttctttctttttcacttattatttctatgtgtgtccttttggaagttgcagaaggggtattgaaatgctgaccacttaacccaaaaaaaaggttcttccttttattgtgtttgttgatgattgggttcatgtctttgtgaggtgggtttgataaattgtaaagaatttgaattaaaaagcacatctgggttattgaagagatgaaagagttaatattgttggatatgtatgtaaagaaattggggtatagagagaaagagagcaaaaaaaaataagagtttggttgagacaaacagtgaaacaggagaagaagcaactatggagatttgacaagagagatgattggtgactggtgtgtataatgtgtgtatatatgatgtacttttatttattcttttagtcaaatacatgtttttgcataattctcaatttctcatattattattggacccaaatcctgtgaaaataatctcttctttgggctttttctcatataagcatcaattttaaaagcccattaaacccaattaagggatcctcaagcttttccacgtggcacaatcttattagtctttaagaaacatatctcgttctttctgtttatcttgtcgaagcacacttctctgtttcaggagaacaatggcttcgacggctacgaacactgatttcttcaagactttgctttctcctttctcaaatggttagtttcttaaaattctctctctcattctctcggtttatttccataagtatgtgattgagtttgtgtgtgaatttgaatttggagaagaacaagtgtgattaccatgcgagcttgtctcaattagactaatctagattcgtatagtgtttgatcatctacgtctctgatgttttattttccgggattgcaatttcagggaatgcggcgcaacgaagtagtagacagaacattgtttggttaaatcggaagcaatctggaaataataacagatctcttcgtgttaatggattattcggaggcggaaaaaaggacaataaagaggatggacaatcaaaggtacatgtttttagggttcatgttcaatagtcttaacaacacaattctacagttgtgtcctgtttttctcagaagctgttgtgtttcttattgctttcttctatttgtggtaggcaggaattctaggtaacatgcagaatttgtatgagacagtgaagaaagctcaaatggttgttcaagtagaggctgttagagtgcagaaggagcttgctgtgtatgtccccacaccattaacctaacccatttgcattactatattctttaagtttcttctatctttatgagtttcattcatcaatgttttgattctctttttttcagtgctgaatttgatggttattgtcaaggcgagcttgtcaaggtattattagattactgactcgggatcatgtttcatggatgtgagacatgtgctgtctgattcaatactactgtggataatttacacaatgatgctatttttagtttgtttttctatctcttactagttaagtgaccaaaagctttgaacttgtgtatcaggttacattatcaggtaaccagcaaccaattcgcactgatatcactgatgcagcaatggagttaggttctgaagtgagtaaccttcacctttactttctcttgcacttgcttctacataggaatgatcaaagctatgttcagcttctcatgtttcttgtcttcctttggcagaaactttcactgctggtcacagaagcatacaaagacgcacattcaaagagtgtactggtaaagacttcgcatactatattttacgatacaactataagtgttcattttctttcatctcttgcttatagaaccttttgaatttcacaggctatgaaagaaagaatgagtgatcttgcgcagagcttagggatgccaccaggccttgatggattaaagtaacaaaacttaatcttttttgtgatttctttcaacttataggtatgagaagtccagttctttttgttgtatatcgatcaggcagagagaaatagagctctgttctactgaatcagagagagatatttgaacctttgtcttcttttgattatcaacaattactcaaatgctctcccaaatagttttgtagtttccaaattgtggaaatgaatcgagcttttaacagaaaaaaaagtagaagaataccgagtttactcggaataggttcctaatctggtagccaaattgtccttcgggacattttctcttactctatgtttaggttattaaagtagctaataagatcttgggagttccttcccggccaagaatgatctgaaaagaatgagagcacgctttggttcaaataaaggcacctcgtggcctgcccctcgtaccgttgcaaaggtcagtcccttgtaaacctctgtccatcctcccacctgtgaccacaggtaaacatcaataccttttacataatacatatccatgtacatatatatatgcagtatgtgtatgtatatcgtacctggttatcagtgtaccaaggataccaacgagttttcaccgggagattaagatggctgagggaaaaccgtgtcgcggtcactggaaccaccgagtctgtatcaccgctgcatatgatagtgtaaaccacagtttggttagtagccaaatcccaaaatagtgagtcttgagttttgctaggttcattacaagcctaaagaataattggccatattaagctagaccctgatttagtctatatttgattattttagggtttaggttcgatcctgatttggctctgtggtttatatgttgatccacggttaggaatccgcctatgtctatgatcccgagttacattggaccatagtttacctgaaaatccagatcctcaaaccggacgctgcaagttccttgtatatgggcaacatggtcttgtccgaatctttccaggtcttgatcagaacatcactgcctcaacccaaacaagaaaccatttctttcaggatcagttatatgcaaagtgtcattacatagtcatcattaggtggtgaagcgaactgtttacctgcaagctgtccatttatagcgaattccagtaacattagcgtgcatggctctctgaacatcgggacggttaaaatacttctctgcataactctccgtacaaggatcatagccagacactaaccgtctacgcaagagtgtgttcttcatccgcacaaagaaaccggttgtgttcttcttctgttgagcagccacgcacgttggggtgtaaatgctgtactgatcaatgtcaccaaactcatggttcatagcgtagttaaccgcattgtcgcaatcgtcggaaactctctccaccgtgaaattgcagtatttgaggattgacttgtagcttttgtcggagataattgcgtgagtccaccagtaagttactgttcctatactgtcgtactgattgtccgtcactgcatttcccacctttagcaacaagaatggtaatctttcgttaattaggaatcggagacatatagttttgatttgagctaagtagaccctttttgtttttaccaagaatcctttgagattaatgattggtttggagaaagctttgttgtagtcatttatctttttggcaagctgaggaacataatgccctgtcaaaataataatgtccattaaaattatttagcaaataggcaattcttgaatctttaaacggaaccaaatttgtcaaaacaaaaaacgtaccggcatagctttcaccagcgatatagaagtctctgtatttgtattgaggaaatctcgataaccatttgataagaaatatcaagttgtcttgagctgtgattaggaggaatatgatcataaacatttataaatcaattaatctctagcaaacataagaatgtaagtaaaccaagcatgtcgatttataagttataactaattaacagaacatgcatgatttaagaaaatggtaaacctgttcgttcatctccggagtctttaagatcggagcttgtgttcgtgtaggaatatccaactccggccggtgattcaagaaacagaaggtttgcgtctgttatagtacacattcaataatgagaaatttaaattttgaagcctcaaaataattccttacatgaagcatagaataaagtgaacttgtttgtaatgaaatttgtaatcacctttgttccaagcgaacttgttgagatagagattggaaccggttttgttgatacgaaacggtccaatttcctctgaagctccataagcaatcgacgagcagcccggtcctgtatatttttttgagtaaataaaatagtttcatcaatgccattatttatttacttataataatttacaaatgaatacaaaatcctatatatgttataacatgtgaccagataatgatatagaaagttctccatttcaaatttgtaattaaaaatttcttgatcaaatttatctcaattttccccctaaaattaacgttttcgagttcttggtccaagatgcatgaatgttacccaaattatggcatctttcgtgcatgctccgattttctccctaggaatgattaaatcaaataattaaagtgactataaaggccaaaatataaagaacatttgatgaccgcttatatttccggaccagaataatctatatattgatgatgtcaaaataaataaaagtatagagctaaaaaaatgtgaaaaattcacgcatgggcgtgagagtgtatgtgcttacaaaattttataactaccatcatatcaacttgtgacctccatgaatacgcatgcttcttcaaacaattatcttgtatacataacaattcccacaaaagcaatttgaaagtaagggccatttttttttttccttcaataacaaggtcaactttctattacaaatttgaaagaaaaataaaataaaatttcaaagaaaaagaaaaaaatagtaagctttttggtaatgtgtatgtatgtatttttggatataattattaaaggcagcaaaaaggtaatgtcgcctttttgtcatgctttcttacataagctaatgaagagacagaagaacaaagccatctaaaagaacaagttgacgccagaaagtgacaagagaactctcagtatataatgatttcgtagaagaaactaaaactgtatcattttaacccaaaaaaaaaaaagactaaacttgatcaggctaatcatgcttttatgtacttgtaattgcattacgactattgttttcaaaaacaaatttctaggggaataataagaaatatatacattcatcataaatctattcgcctaacaaaatagtataaacagaaggatagggcttgcaatttactttcttatggctataactgtatgatatctatagtaccatgaatgcttatgtccaagataataagcgttttcgtgacatgaatcaggcgtatcacgcatggtttgcatgatggggaattgaggatatatatgatatactccaatttgtatattttagtgtgagataagagcttttactacaatgcgctcgagtactagaagtgggtagattgcacagagtacgaaatccgaagctcgtggaggacttatatagtaatattaatgctcttgaacaggcaattaaataaagatgtaagagattaaaaaaaaagaaaaaaaaaaggagtgcatgttccattaatgagaggcagatggggtagttgatatgctattttggttggacattggtttgtttttatcctaaataacgattattgcttacattagtgattgctcaaattagtaattgttaatagatgcggcttgttggtttagtctcatagtttgtacattgtttagggactaattaagtttttgtttgttttttactctttgtccaaaagaaaagggactgtacttatgtaatatttgatacataaccatcttaacccattaacatatgggtccgcggtttggttttggtttttattttacatctttagaaaatttacgctgcttttagtttagtctaatttggagtagttttcgtgtgagtgcaatgcatatacaaattaactatataactcatagccggaataaactaaaaatatagttcttagaattataaacacaagaaaaatatataacaagcatatgcaaaaattaaccatgtataaaaagtaatttggagtgaagaaactgacctccattgagccaaagaagaaggggcttggtgtggggagaaggagaagatgactcagtaagccaatagaagagggcacgaccatgagactggttaacattgacatagcctgagtattgtgagaatgccacttttggttggcctggaagtgctttgattctgtccttctcttgctctcttgaagatgatgatgatggaaatgttgtcgataaaagagctacaagaagaaggaaaatgaaatgggttcttgccatttcgtgtcctctcacacactctccacgctttttttttcttcaatgggtttttgtgtgtgtgtgtgtaattaattaggtcatatagtatatggagatgtatctgtatttatgtttgtatatatatatatatatatgtgtgtgtgtgtgtgaatgtgaagagaagtatagattgatggatggggttttggaggttcttatttaatgtgtgttttgctgagatactacacaatgtgcaggttggccagctgtgagtggacctttcttatttattggcatatatgttgagtatatattataggtgtactattcacgagtttgtatctatatagccaatataggactattcacgaggcttgttcacaacactatcaaagctagtatatgtaaatggttgggcttatatttagctgtggtgtttgttgcttcacccacatagaaccgtgtcgcgccatatgcggtgaaagtgaattgtcattatttcggcttcaaaaaacacataagaaaaagaaattttggtcttgtatgtaatttgaatcagttaactaggggggagctattaacagaataaaaattatttaacaatttagcatgtggaaccgtatgttttatgcatagtccgcattaaccagtgtatactctacaactatttgttcagattttcaaaaatgttataaaaatttgatataatgaaaatatgcatttgagtttgtgtacagaggaaatactacattgctaatatttgaaggcaaatgtggatcttgaatcagaagaagatatgatttagaatcagaagagaattaaagccataaatgcaatattgcacaatgattattttatcttatgttatcatcctctaatatgcatgtaaatgctaacatgcatattctttattatttacatggtaattactaattagcgtaatttgatgatacacaatcattttttttttgtcatcgatacataatcattcctatccatatatctcaacattaacttttaggtaaaaaaattggaaatcatttgactgtgtcttgattataataaagacataatatatccataaatgctgattggtgatcaactaggtgacattaaagtcaaaaactctattcgtgataatccaaacaaaggaaaaatacagaaaagaaaggtgtacttaccacaagataaccaaagaaacaaacaaaccgaaattttttctataatactttgtatatatcgcatccaaaattgttttataccgcatgttttcattaggaacttaagtggcttatgagctgacaacatatcatgaattttaaaaatatatcagttcgattactatagtaatattttaggtagacaacaaataacattataaaatttcaaacacttaaaagatcaaatttacttaaatttgcaatgtacaacacaattgacaattttaaatggagacgtaagatgtatgacacctaaatttgcatatactgatatatatacatatctaaatttgttcctcaccatgttactataaagattttctttgttcctcaccatgtattggtcaaacgaaccttcatagcttctgtcatattttgagagttttattcaatattcataatccgagttgtggtcaacacaagttgttaagcatcacttctccaccagaccgattaaacttctttctttattcaataatcaaatcttctgataactagtatacaaaaagttataaacttaaatagttctccatctgtcatgtaatgttaccaagagactattactaacagtaccattgcaaaaggctttcaattccgttgtgtagtaaaaatgataggtccaaatcggtgcccaaaaagctggtagacaatgttggatatatatgtaaatatatttctcagaagattaaaaatacttgtaattctcttccttttttctcttataattgatgtttgcattcagctgttgcctgatgatatgacttcacattgttattgtattggtttacaaatggttttaaaaagcgaaatgttgtagttagtgaagataaaattacaaaatttctagataaattatacaaaacgtatgagtagattgtttccaattacaattcttgtgctttatataaacaactacaattattgatttatgtaaatttttacgaactatttatgtatatatgatttgtagacttgtagtcttctttctctctaaacgaggttcaaactcggagataacttataaaatgtttctatatgcataaaatcgagtttgattatgttataaatcacaccgcaagtgtatttatgaaacaatggggattgcgaccctaattctattcctaacaagtagacctttaaccatcgaagtcaaaacaataaaaagtgctggcgtaatgatcggcagatccgaaggaattgcgatcattaatggttgaattttatgcaacatgcacgatctatatttatggggatttgatgcaaattattttaatttcacttatgactacggtcgattaagatttaacgaaaccatttacattactatacattataatagtcgaataaaggcctttgtaaaaacgtccatgggcttttgtaaagaaaactaaatggagaaatgtgctgaagctaaacgaatccaccacattaattttcctacacgagtttctcctattttatttcctcacctacatgaatcaataaacttaacactatcgcgcgacccatgggctaagtagctgatgctttttagcgaagggcccgcaggcaagaagagcaaaacattaaaacgcaccgttttaaaagttgccgcgttggaatatcatctgcgtgtcgctagtcaatgggacatcaaaatttcattattcaccgtccatgactcgtctcccaccagcttccttccacgaaccaaacttggtttcaactttcattattaatctttttttttttttttttgcaactttcattattaattatttaatgttctcttacctgtacaaaatttagctaatttcatatttaaaaaagaattgactaaaaggaaagaaatcccaaacaagataaaattaataaattttctacggactcttgaccaaaaccaaattctattctccctgggaacaaaataaagaatttattctaaaaagtaaaaaccctatatatataccaaggaatcaatagaggatcataattttacacaccttttttttttttttttttaataatatagctctcgtcgtttataattttttttttttcgtctggggcaaattgtaatctagaaacgacaggaaccaaggtttggatcctccccctcgaactctacgattcgttcttattctcaatctctcctccttgttgttgttgttggatattgaattctcggattgaaaactcgagatccgtgttctgtttttttttccttcccgattcaacacgatcaattggcaattcgttgtttgcgtttcctgatccgttaaagttgattgcttttttattaaatctgcaaaaatattctgacttttatgcttttggatttaggtagctttagaaattggacgatttatttcagctcattacgatttgatttgaaagatcgttttttttttgttcagggttacgaaattgaagatcgaagatgttagaacagcttttaatctttacccgaggaggattaatcctttggacatgcaaagagattggtaatgcattaaaaggatcacctatcgatactttgatccggtcctgtctccttgaggaacgatctggtgctgtttcgtttaactacgatgctcctggtgctgcctacactctcaagtggacgtttcacaatgatcttggacttgtctttgtcgctgtttatcagcggattctccatttgctttatgtggatgatttgctttctatggtcaagcaaagcttctctgaggtctatgatcctaaacggatggcttatgatgatttcgatgagacttttaggcagcttaggattgaagctgaagctcgtgctgaggaattgaggaagactaagcaagtggggaagcctgtgaccagtgttaagaagcaagggcaggtttcaaaacctggacttgaaggaggaaacaaaagggttagtagtgaaggtggttcgaagaaagatgatggcgatggtggtaataaggccaaagttagtaccttgactaatggtcattccaatgggaatcatcaaatggaagatgattctcaggagactaatgatcttgctaacgggaaagaaaacacgagttctaatgttgctgttgatttaagtaaacttcagaaacttagaagtaaaggagtcagaggtagaggaggtgtaaggaaaactgacagtataggtaataagagttccaaggtagcggaaccagccaaaaaggcgacaaagaaaaacagggtttgggatgatgcggctcccaaacaatcgaaattggacttcacggattccatcgatgaaaatgggaacaatgatcatgtagatattgtggctgctgaccaaggagaaagtatgatggacaaggaagaggttttcagcagtgatagtgaaagtgaagatgatgacgaaccaggaagtgatgagaagcctgctcaggctaagaaaaagggatggttttcttctgttttccagaggttagcattttttttcttgttgaatgttgctaatatatatatatatatatatatatatataacctaaaacttattaacacatcttgtgattttatgtttagtattactgggaaagcgaatcttgaaaggacagaccttggaccggcgttgaaagctctgaaggaacggctcatgaccaagaatgtggtatgtgtctgtctacacagtgcattatgtctcatatttggaatttgttatatgtcttacttgagcttgggcgtttcattcgcaggcagaagagattgctgagaagctttgcgaatcagtggaagctagtcttgaaggaaagaaattgtcatctttcaccaggatctcttcaaccgttcaggttttgtgctttgtccttatagctcttaactgaatctaggaaacatttcactctgcaatttgaagatagcttaattgtggtgtaacatatgatttcaggcagcgatggaggatgctctggttcgtatattgactccaagacgctccattgatatattaagagatgttcatgctgccaaagaacagaggaaaccttatgtggttgtgtttgttggagtcaatggagttgggaaatccaccaatctcgctaaagtggcgtattggcttcagcagcataaggtcagtgtaatgatggctgcttgtgacactttccgttctggagctgttgagcagttacggactcatgctcgtaggttacaggtaatgatatatatgtctgtgttttaatattcaaacagtcgtgtgatttaaaagggtgttgttgctaatactgattttttaatggggtggttgaattttgtcaacagataccgatatttgaaaagggttatgaaaaggatccagcagtagttgctaaagaagccatacaagaagcaactcgaaatggatccgatgttgttcttgttgacacagctggtcggatgcaggataatgaacctttgatgagagcactctcaaagctcatcaaccttaatcagccggacttggtcttgtttgttggtgaagctcttgttggaaacgatgcagtagaccagctctcgaagttcaatcaggtttggtttcttacccgcattagactcctgttaggtgtttaactgagccttattgacgttgctttttttctgaaatcagaaactttcggatctctcgacttctgggaacccaagactgatcgatggaatcttacttacaaagtttgataccattgacgacaaggtacagtaaaatgatagttggagttagtgttggtttgaatcatataaatgaatgttaacgagactgtttgggatctgtttgtaggtcggagcagcgttgtctatggtttacatatcgggatcaccggttatgttcgtgggttgtggccagtcttacactgacctgaagaagcttaatgtcaaagccatagtcaagacacttctcaagtgatctcctcttcatcatcatcatcatcactatcatcattaccatctactatcaacaatcaatgtcttatccatcatgctgttgtttttggttttttatttgaagacggtttctctttggaagtgttgtgttttctttaaaactcaaaagactggagtcgcaaaaaataccatcccatgactttatatgatgcaacgtaacttttgttttaaattaaagattaataatcatgtgaaatagtgtcatcttttattttgttattttaaataattataaccaaatgaagattgaatttagcatgatttaaacttgaatctcatcacctaagttttcaacttatatataagcaaagtaaggtcataaatttatgatatactaatataatttcgtttgctgataataatgaaagaataatcttttgtctgaaagaagacgtccttttgtgtgtttgaaaataaaaaactgagcaaaaaacgtagtagaacgttcagagacaaacaaaaaaaacatattaattcatatgaaacgttatttagtggtaaatctagccatcttaattatcatataactgttacgaaccaattgaaataatgtcgctctgccaattgaaccggaaattttcatgcataacgtaaaaaaaaaaagtaccgttgtcgtagacatcgtttttgcttttaagaaaattgtaaaaggtcaaagattacataaatagatagtccgttacgttacatttttaaaattacgtgttttcctagttcctactatcggaccattctttgtgtaatcgtttgacacattttcaagtttatagaaattaaagtcatttatattcaaaaacagattagtcttttattttataagatgtaaaagaaaaaattggaaagatttagaaagaattagtatcttgaatattatggactagttatttttttttcttcaaaaggatgaaaacaaaaaattacgatcaactcatagtcatagtggttcaatagttaaattttctttttgtgattttaaacatcgttgagtactttaaaaacttttcaacatttcctatttgtaaattggaaaattatatatattcttaagtttcaatgtttttcccaaactgactactttaccttacgtttatatgatgatcagaagttcagaactactattcgaatattattttaaaaatatttaagaaaattatagcagaaatatgtgtgataatttattagttaactaaacacatatcaagagttagtttattttgaaacaattaataataaatctaataattcatttagctttaaacagtaaattattttggaaatcaaatctatatttaacgtagacaactcatagcaatttattaagaaatcaatccaaattaaagatttttttaattttaaactgaaacatattgtttttgtaataaaaagtaaacaaaaacggacattaatttagcaaatcagagagagattactcttgaatactcggttaggaaatcccaaacctagctccgaacccccaagaaacaagatttagctccaaaccacaatgactatataaacaccacatcaccatctcatattttattcacagagaaaacaaaaacaaacgagagacaaaactcaatccaaaacaaaacaaaagccaagttttttgtagtaagtaaaaaatccaaattatgggaatcatagttccagttttgacccttgtcttcctcttgtttgctaaagtgagccatggtgcctccaatcctagggtgattctagttggtggatctgtgggatcatggaaggttcctgattctcctaacaacactctcaatcactgggccgagaacaaccgtttcaaagtcggcgacttcatcggtactcgatatatatctctctctatctctttacttctgatatatttatatgctttgattctcttgtgatcatatgttcataaaaatttatatgcatggttgaatatttgatatatatttgttgtgcatgtgaaatagtgtggaagtacgacatgaaagtagattcggtactacaagtgacaaaagaagattacgagagctgtaacacagcaaatcccttgaagcaatacaatgatggaaacactaaggttgcgcttgacaaatctggcccttacttcttcattagtggtgctcctggtaactgcgctaaaggcgaaaagattacccttgttgttttggctgaacgcaaatccggtggtggcagcagcagcggtgacgctcctaaggtttctcctgttagtcctacggctcaaactccagctccagctcccggtccagctgcagcccataacgctgcggtggggttgaaggttgcaagcggttggttcttgaccgcagtcgtggttggtttggctatggcttagagcttagaggggtttggtcgagagaatgtagtttttattgagttcactttttagcaagatttagttttatttttccagattgttgacgtttcttttgttcccttagtttttcattataaaagatctctctttctgttttttgttatgtgtttgggatattatattcactcttaaagcttataatctatagtttgttcttgccattttgaatctaaaatttcaaaacctcaacaaggcaactacttgccgaccatcgatgaactgatcggattaatcaaccaaagtttaacaattttcattttttctatgagatatgttgactcaataattaatacaaagagattcagtcgactctatcttaatggtaataggattcatttgtagaaactaaatatatttatttaccaaaatgaccattgtgaaagtggtaattaaaaaacaaaactatatatggtgtccaagagattcttctatctctaaaataaaagagaatatatatgctacgttatggaaactacattttgaaatctgccttgcatgtactgattgatattctaagattgttcttgattttgttggtaacgccattgtgcgtggtaataaataagacgaggccaagtggataatgtgctaatctaattccattacttacacatatagtacatctttgacttttaagtaatctatcgttactaattaataattatgataattaaattacccgtttcacttatatcatggcaacgtttctgaagaaaactatactacacatttacgctaacagccgtataggagattaaattctaagaattgtacgttcaaagtctgaattaattcagagaattttgtttttgttttcaaaatttaaaagttggtatatattgatgaaattagttcaatgtagaagaaaacagtggtgaatggattttgcgatgaaaggaaaaaatggatttagtgattaatttaattcaacgtataaaaatgcttaagtttgataatgggtcactaaaagaccattagttcaaatgggccattgttcaacgacttcaaaggccttgtacaatagtttgctggcttcacttacaaaaacggcatgcaatctacgtcacaaactagaaaatgcaatccgccgctttttcaaagtaaaacgacacacagttgatgtttagaaagtgaaaacagtagagcagggaacccctgagagataagcctgaagatgacacaaattacatgagcaaatcccacgcatgtttttgctccagattccgccatggatgtcgcttctgctcggagcatctcttcacatccttcatgtaattgcaagtttcggattgtagcttattttgtcaataaagtaacttcaatatcttcgggataactttttcttaattatgttcgcagattatggaaaaccgatttgttcatcacaatcatcgttgattcgggtaaattttcgttttatttggatttttttactctttattgattgattcgcctttcgtttctgagaaaatgatggaacgtaatctgcaatggaagcttaattagaatttttacttggtgatgttaagtgaagtatcaagcttttagttattttcattaaacatattctggctctgttgagattttgatgtggatttggatagttggacatagttgaacaatgaacatgaagctctcttctaattgttcttattctatgaaatcattggagatgcagatttcgagggataaagtttgttgctttggtcgcatttctaatggcatgacgagctttactacttcccttcatggtaaggcaatcaaactatagttttaattgtcccttgatgcggttttgttgctggtcggggcgttacaatatcatttcaatcattccttgctatatataaagacttgtaattttatataggatctactcattttgtttttgagatctgatcgagttacttatccatatatctatttcgacgtgagatactgagatgaatcttttaaatccttacttgcttcgctttccatgtttcttctttagctgtcccgagtgaaaaatttatgggcgaaacaagacgtactggcattcaatggtctaaccgctctttaagacatgatccttacagatttcttgataagaaatcacctagatcaagtcaattggcaagagatatcactgtgagagcagatctttcaggagctgcaacccctgactcttcttttcctgaaccaggttttttttggctaaacctttgtgaacaaatttcatctgttttggtagattacaacctacatcgttctttttgtttgttagtttctgtctctatacacaatcctttcttgttctttcaactttgaagtgcagagattaagttgagctcaagactcagagggatattcttttgtgttgttgctggcatttcggctacttttctcattgtcctgatgattattgggcatccgttcgtccttctcttcgatccctataggagaaaattccaccacttcattgctaaactttgggcttccataagcatttatccgttttacaaaatcaacatcgagggtttggagaatctgccatcatcagacactcctgctgtatatgtttcaaaccaccaaagttttctggatatctacacacttcttagtcttggaaaaagctttaagttcatcagcaagacagggatattcgtaattcccatcatcggttgggccatgtccatgatgggtgtcgttcccttgaagcggatggacccaagaagccaagtggtatgttactctttgtttctcccacatttttcaagtgttttgcttttaaacaatcttcaaagtgttttaactcttgtgcaaattataggattgcttaaaacgctgcatggaacttttaaagaagggagcatctgtgtttttcttcccagaaggaacacggagtaaggatggtcggttaggttctttcaaggtaaacacagtctcaagattcttcttgatcatgttttggtatgtgtgttaacataagaggctggcttgtgatattacagaaaggcgcatttacagtggctgcgaagaccggagttgcagtagttccaataacgctaatgggaacaggcaaaatcatgccaacgggtagtgaaggtatactgaaccatgggaatgtgagagttatcatccataaaccaatacatggaagcaaagcggatgttctttgcaacgaggccagaagcaagattgcagaatcaatggatctctaagctgatctcagaagttgtcttttgctgcgtctctgatgaacattgagaagctttaatttttacatgtggaagaattaaatgttgagatcttttttagtcaaaaattgtgatgctccctttaatgacatttaaaagaaactatcagtttttggtttattataaaattttgtatatttcgttgtatctcgcgaattatcgtacgtatcacagtcttggccgcattgtcacgcctcccaggaaacagagtccttcccagtccgtacgtgatttccgacttgtaatcccagaagacgtctccttccaaattccaaatctcatgtgagttttattgtatctcttttgttgaactgtgtaatttcggtctgttgaatgtatcgagttgaatcagagattcctgtgttctcagtgaaactgaagcaatatatactgaaatagttgtgcttataattcttgttgattctcccatagatgacagtagatcatctggttatatttatgcagaattgaaggctcttattctagttggaggattcggaaccagattgaggccacttaccttgagcatgcctaaaccacttgttgattttggaaacaaacccatgattttgcatcaggtaggttagcttcttcttcttcttttgtatttgctcaagttttcacagtttcttttgttctcattatgatgcattcgcagattgaagctctaaaaggtgctggagtgactgaagttgtattagctatcaatcaccaacaaccagaggtacatacattcattgtccttaataacgatacgataacaattgaaattcttccgtgtcatcctccttctccttgtgtgtttggtattactcaggtcatgttgaactttgtgaaagaatatgagaagaagctagagattaagattacattttcccaagaaactgaaccgcttggaacagcagggcctctcgcgctggctcgggataagctggtcgatgaatcaggccaacccttttttgtactaaacagcgatgttatctgtgaatacccattgcttgagatgatcgagtttcacaagactaaccgtgctgaagcatcaatcatggtgaccgaggtagtcaaacaggagcattttctgcattttgtgaagtttatctttcatctgttaatagcattttctgatattaacaggttgatgatccttctaagtatggtgtggtggttacagaggaaggtacagcgagagttgaaagttttgtcgagaaaccgaaacattttgtggggaacaagatcaacgctgggatatacctcttgagcccatctgttcttgacaggattgagctgagaaggacttcgatagagaaagagatattccctaagatagcttcagagaagaagctttacgcgatggtactacctggtttttggatggacattggtcaaccgaaagattacataaccgggcaaagaatgtaccttaactctctaagagagaaaactccgcaagaactggccacaggggataacataatcgggaatgttctcgtgcacgaaagtgcggttataggagaaggttgcttgataggacctgatgtggtgattggtccgggatgtgtgattgattcaggtgtaagattgtttggttgtactgtaatgcgcggtgtgtggatcaaggaacatgcgtgtatctctaatagtatcgtgggatgggattcaaccgttggaaggtgggctcgagtttttaatataacggttcttggcaaagatgttaacgtcgccgatgcagaggtttacaacagtggggttgttatcgaagagcaaggtctgtgaaaccagagcctagacctagattagttagttccactgtttccagagtcttatgaaccgcaatattcttacaatttaaaacagatacaaactctatggtaaaccatatcataaaccggttaaaaatggtattcgacaccaatagagaaaaacgtttttcagatccatccctaagcaagttgtgtatatttctttcgtaaatgttttgagacattcttataagggacatataaattattgtagataaagcctatgtttcttaaacacgaaactgtgatttattaatagactatagtttggtgtatgtaattaacgttgagaaaaatgaaagacgtgacggcagagagagagagagtggacccgacccggacggcacggagacactttcagtttcttcttcttctcttctgtctttgtgatatttctctcaaaatcaatattttttcatctgtgaaacgacttcgtctcctcccactccattgtcactttcttcttcacccttctctcgtctccgtctgatttggcgtgtaacttctttctaccgtaattctccttcgtcttcttctctggtatatctcttgcattccctcctaatttcttagccaattactgtttggaatgatcttcattttgtacttcccattgcttgattttggttgacacctttctcgtttaagatcgtctcgttttcatgctgaaaactcaagtatttagttttttcgtttgtacccttttgttgatgttttggtttggggagaaaatgtggttcctttcaagttttttccgtcaatttgagttctcaggtcaacgaaaatggatggatgttcttaacccattaaccaagtttgatttttagagagattctgtaaacaaacaataacattttttgtgcttgaattatttttatatttattgcaagtttaggattttgctgcttgaaatgattttgatcataaatgtttattacattttcttatgtgtgtaaaaacaggtttgggattcatgagttgagtcacaaggaaaaagcatgttagactgtggcaaaaaagcagtcaaatcacaagtaatcagtggccgtctcgagaagtttgtaaggtaactctcattattgtatatagttgatcgaaatttaacatgatgatatcattctagcagattcagatattgtttagccaaaaaggacattcctttacttcaggtttgaaactaaatggatatctttagtttattttgttcttcacaggttggatagtatggattctaggtactcgcagacttctgatactggtctaaacagatgcactctcaatttacaaggaccaacacgtggtggtggtgctcagggaaacaatgtatcttctggttcctttaagaaagggtttagaaaaggttctaaaggtctttggtctataggaagatcaattggtttaggggtttcacgagcagtttttcctgaagatcttaaagtatcagagaagaagatttttgatccacaggacaagtttcttttgctctgtaacaaactgtttgttacttcttgcattctcgctgtgtctgtggatccgctcttcttgtatcttccgtttgttaaggataatgagaaatgtatcggtatagaccggaagttggctattatagcaacaacgctgcggacagtaattgatgcgttttatctttttcacatggctcttcggtttagaacagcttttgtcgccccttcttctcgggtttttggtcgaggcgaacttgtgattgaccctgcacagatagcaaaacgttatttgcagcagtatttcatcattgactttctctctgtgcttccacttccacaggtaataacagaaatgcctctcccagtgttctcttatcttccattgtttctttgttctctaaatttttatgactagtttatgttattctttggatttttcagattgtagtttggagatttctttacatctctaaaggtgcaagtgtgctagcaacaaagcgggcattgcgatctatcattttagttcaatatattccaagattcattcggttgtatcctttgagctcagagttaaagagaacagctggtgtttttgctgaaactgcttgggctggtgcagcttattacttgctactctacatgctcgcaagccatgtcagtacatactatctttggtagctttcctcttatattctcaaaagatccattcatcactctctcttttttcccttatgtttttatcagattgttggggctatatggtacttattggccttggaacgttataatggatgctggaccaaggtttgcagtaatagcagcttggactgtcacagaaacttcctgttttgtggtaatgaaaaaatggatggttatgcagcttggactaccatcaaagattctgttctgcaattaaattgcccagttaatacaaccgataatcctccttttgattttgggatctacttaagagccttgtcctctggcattgtctcatctaagagctttgtctctaagtacttcttctgtttatggtggggacttcagaatctcaggtacgtaattctaaagaatccgtcttctatagtcattatgaaaagtctctgttgcattagtaactttgtcgatgtcaaatgcagcactcttggtcaagggcttgaaaccagcacataccctggagaagttatattctccatagcacttgccattgctggacttcttctctttgctcttcttattggaaacatgcagacttatcttcaatcccttacaatccggcttgaagaaatgagagtgaaaagacgtgattcagaacagtggatgcatcatcgaatgcttccaccggaactgcgagaacgagtcagacgatatgaccagtacaaatggttggagacacgcggagttgatgaagagaatttggttcagaacctcccaaaggatctgagaagagatatcaaacgccatctctgtctggctttggttcggagggtaagttgaatcttactttaaaagcctttttctaatcttgattcataaatgaaaccatcttgttctatttttcttatggaaaggttccattgtttgagaatatggatgagaggctgctcgatgcaatctgtgagcggttgaagccgtgtctgtacacagagagctcttatttggttcgggaaggcgacccggttaacgagatgctcttcattatccgtggtcggcttgagagtgtgaccaccgatggcggaagaagcggtttcttcaaccgcagtttgcttaaagaaggagatttctgtggggaagagcttttgacatgggcacttgatcccaaatctggttccaacctaccatcctctaccagaaccgcaaaggctctaactgaagtagaggcttttgctttgatagcagatgagctcaaatttgtggctagccagttcagaagactacacagcaggcaagttcaacacacattcagattctactcgcaacaatggagaacttgggctgctatcttcatacaagccgcgtggcgacgatacgtgaagaagaagaaacttgagcaactcaggaaagaagaagaagaaggagaaggatcagttactagcatcagagcgacgttcctggcttcaaagtttgctgcaaatgcacttcgtaaagttcacaagaaccgtattgaagcaaagtctactatagaacttgtgaaatatcagaagccttcagaacctgatttctctgctgatgatactagttgaccaaattttaccagaaaagtgctaatgtctatgaacgcttataacttgtataactcggattgaattttattgtttgatttgtgttgctacattaagataaagaaaaaggtggtaacataaaagattatttgtgattgtgatttgttttatatgtgtttctttctgtttcctgaagataaaatatgaaagatactgcaggtttattgagagatgacatagtttttgataagttcatacagagataacatagtctcggatcatcaacctttcaggaagtttttgcagagcttctgccatagaatcctgtctggttgcgcagtctccatcgtactctttgccttatccgcaaactcttgctgaaaaaaatcaatcacattgcaattcttgataaggctaactacattgagaacaagaacactccgaaatgtttatctagcaaaaatagagatcatagagaaggagaacaaacctccatcagcttcatattaaggactcggtccacaatctcaaacagaatctctttgttatactctggatgcccttgaatacagaaaaaatgatctccaatagagaacatctcgacgttacatacctcagaagaagcaagtagtgtagcagactcaggaagttccaacacttcatcctgatgacattttataatagctaaagatgctgggacctcaacgtctccaaagtaacctcgtagtttttcattgtctttcgctatggttatgcttctaagtcccatatctgcacctttgagtgctcttcctatcttcccacctttaactctagtaattatctatagccaaaagaacagagacacaatccagaacaaagcaaacgttcatcaacaaacactctctccatcaataaaccaacaatataaagatatcaatctaactataatggcattggaacaactcgagtctgatctaaaaattgaaatgagctaaatgtgagtcaatctaaaccctaagattccaaccgatcagatccaaatcagaaattgagcaaaactgaattgaaaggaacctggtggccgaagcagatgccgagaactttcttcttcatgtgatcaagtttctgacaaacttcgcaaagcttaacaatccaatcggcgtctccgaaagcatcatgtggactaccactgataacgaaaccgtcgtacttgtctaaatcattctcgtcgggaaattgtccgtcgatgactcggaatagatcccattgctcaccttcttcgccgaaagttgaaacgaagacattgaagtaaccaccgtaagtcttcttcacgaactctgaatcacacgtcgctaaaaacaaagcaaacctcttcttctgctcaataaccaccatcttcttcttctttcgtctcagagatcacaccgatgaagcaaaaggagagatagagattcggagaatggaaatgtgtaagttagagacgacgacggggaacaagatcagacacgccaagtgagatttttgttaaataaagaaaacagaaaaaaaatagtcaaaaattagttgaaaaaaaaagaatcacacatcgagattagctgtctataagatgacaactccacctaataatttatctaagtttagaatcacatttatttgtttaccgtagctcgattttacgtgtattttttgaagatcaaataatctatttatacacgtaacctatacccacttataaatgactaaattaaaattacaaataccagtcttcttctttttgtttatcggtaatttattattattatttcttatagcagtcggtaatttagttaaaagcgaagatatgttacattatgtgatgaccatgaccatataatagttatgaaattacacaaacgtagtagaatttatttagaccatgaacgtggaaactaaaccaattagtgggttcttcgtcctttcagaaaattcttgcaaagcatgtgcaaacgctgcgtgtctggttcaaacttcttgatcgaatcctttgctttctccaaaatttcctcctacatattttttagtttaaaaaatcgttttagagattcctcaccctggctacatatatatatatatatcctgaacaacggaatttaaattgggtacgtagcggaataatctcccaagggttgggacattagaagaccgaccaatctatacataataggattaataaaaccaaagatagacgtttaaaacgaacctcaacaaatttgatcttgtggacacgatcaatgatctcaaggagaatctctttgttatactcgggatgaccttgaaagcaaagcaagtgatcttccactgagaatatctcaacgtcgcatttgtctgagaatcctatgactctagccgactctggaggctcaagtacttcgtctcgatgacattgtatgatcgacaatgactcgatttgatcgaagtaatcacccggtttgatcacatcttgaacgatcgttatgttaccgaggcctatgtctggtcctttacgagcccttcccactttcccacctcttactctacatatgatctaaatccaaaacaagaaaaaaaaacgtaagctaggtatatatattgttttcaggattattaaccaccatgtgtagatgaaactaatccatacacacatacattagttatttctttgataagtacatttattcgtactcatataaagaatttataaagtatataacagtgtacttaatctaatatcttttacccaaatatatcattttacaacaacaacaaaaaattatgtttttcttctttaattactttctgtctataataataatatctgactagaaaattaaaatttacatgttcattacacagcctaaatcttttccatattcattacatattgcatgctatctcattttcaagttataaaacatgatgtttgatgattattatcctcaatatatatatatatatatatatattccacgcaaaatttaatttgaaaatgatatagcatgcaatactgcattataacttgaaaaaaaaaacttgaaaatgatatagcatgcgatatgttatgaatatggcatgatgattctaattcaattatgcagtatgcttttataatttaaaatttattactttgaatagaactagattcatctagtctaacgctagtctacaacatagcttatgaagttaggcaaaacagttatgtacatcgaattttaaaaagagaaattacgaaagaaaaaacatgcacttttatgtaaagattttacctagtggtaagtaattaaaaaattatacaagtatgatatattttaaatgatagaagaagaagaaaacgttggatgataataatatcaaacctggtgaccaaagcatatgccaagaattttcttcttcatcacatcaagttttttgcaaacagagcaaagctcaatgatccaatcctcttctgtgaaagcgtcatgtaaactcccactaatgacgaatccctcatacttctcaagatcttcgtcgcgaggaaactcgccgtcgatcacacggaaaagatcccattgctctccttcgtctccgaaagccgacacgaatacgttgaagtagcctccgtacatctccttcacgaactcagaatctggcgtggcttgaaatagagcgtatcttcttatctgcttcaccattgtcatataaagatattattgacgatgagaggattgagagatgtgttggggcatatatgcaggaggactaggagtagacaatttcggtttggtctaaaagaaccggtttttggtttggtccgtgtactgagcaaattagttttggattatcgcaacaactgaatttatggattcgaaatgttaaaaacgtatgcagtatgcatctaactgatatccattttaattataccttgagccatagagggaaaatgcaagacaacaattaggttttcccggtttagtattattataccggtttaaattacaagatatgtgattagacattacagttggtttaatcttatttactcacgtgttttttgggcattatactatatcattacgaatttgcgacgtgtattttggcattgattctttgtgaatcgcaatcgtaaagggatttgatcattgatggacgtcaaaaaaaaaaaaaaatggaaagatgcattttatcactacattaatagattgggaaatggaaaggcggtaaaaatgtagatgaaacagatttctcccatctctctctgttagttaattatatagtctaggtattgagtgttgcattagcatgataaatttataactaaaagagtgttatgtacaatatttatgtgaatgatcaatagcttaattgtcacctattatacaaaaaatattcggtcatgcattgcttagcttttttcttttcttatgttcgtggttctttgtttgaatttagggtaaccgaaaaacatgactacaatcacatgttaaagaaattaaagaaatgcaatattcattatataggtttcttgaagcatatctccacttttttatttgacaactgcaattatggctttaaatagcttaggttcttcttattcatttatcaactggtataacacaaataagtcacgccgagattaatatgtcgttatacattgaataaaaataaagcaagatcataaatccacaaattgtttcaatatgacaagagccaaatagataatttgggagtgaaactagttagttggaactctgcctttgaggaagttcttgcaaatcgtctcccaaagcttcctgtctgctcccctattctccatcgttgccttagccgcatcagcaaattcttgctgcatatttaatttacaatttcttagaaatattctagatttttgtcctcattgatatttaatattcgattccaaaacagttaaaatgatcataagtttataccagcaaggcaacaacatgccacatgttacggaaattggagtaattgtgtcaaccaaatgatagatactatgaggtgtactatattgaagtgactaatcaacaacaccctaatttacaatattctatttcgagccggtgaatatttaatccaaaacccacccatatgtactatatccaagtttttcaatgttattgttgtctgtaaattgatcaaggttaagagaaaagagaaataaaaccaaccttgacgtagcctagagcaagaacacgatcaacaatctcgaagagaatctctttgttatactcaggatgtccttggatacagaacaaatgatcctcaatcgaatacatctccacctcgtagttcttggaatacgcaagcactttagcagtttcgggcagcaccaacacttcgtcctggtgacatttgatgatcgctatgctatcaggaatctcgtttccgaagtaacttccaggcgtaatcgcatccttgacgatggttatgtctccaagtttaagttctggtcccttctttgctcttccgactgttcctccccttaccctggctatgatctaaaggaaaaatcgttttcaattagaagaatattttttaatcaacaacatgcactattcagtttttgaatcattccaaatgatatcacaacactaattcaaaccaataaaaaaaataagatgaatactcgccactagtgaagaatcagtcccttactcttatagataataatctttattgtcatgctttattgaatactctccactagtgcatacatttattaattaatgacccattcatcaaaacagccaaaccaagaagtgtgatttactttgttcattaaatattttcacggaaatgacccatttattcattcataaattggattttgttttctctaaatgagcatctttaacttttcactcgatgttatgcacaatttaggttcaatttaagtactagttgtttagaatcttagacaactaacaaaattcatgaaataaaaaaaacaggggatgttcatatacccattaaattcacaaattaataaaatgattcactttaaaccaataattaaaagttgaaatgacaaaaaaaatccaatatatttaaaataggggataatagaaaaaagaaaagaacctgatgaccaaagcagatgccaagaattttcttcttcatctcatcaattttcttgacaatatcacagagcttaaggatccaatcatcattctcaaaggcatcgtgagagcttccgctgataacgaagccatcgtatttctccagatctttctcgtcaggaaactctccgctgacgactctaaaggagtcccaatgctctccttcgtctccgaacgtcgtcacgaacacgttgtggtatcctccgtaagttttcttcacgaactctgagtccaaagtcgctagaaacagagcgtatctcttttgctccaccattttttttgttctggctaaatgaaaatacaaagattgattgatttaggagagagattgagaaatagagcagtggagaataaagacgtatgtatgtatgtatttatatgagatttgatttggtcgacctacctactggttttttaattttccacgttttatgtaacagttttgtatatattatagttttaattttgttgtttacttcagaaaaaaaagtttagaggctcttaaaaaaaaaaaaaagtttagaggccggagtggaccgtggacggcaaccgttgttgactctattctgaatgattgacacagtttgaacatggatatcatttgtagacaaacaataaacaaataatggaatcacttgtcaaaagaaattaagtagtaagtatttcataattaaattagaaatatatattatttttttattattgatatacttttatgtctctacacgatataaatgcttttaatagctcaaaacttttttaaaaatctagagaagtaaattttgtgatgactaaagaaaaatacatgagtatttacactatgtgattctttttttttaaaaaataatagttttgatttttgtattttattatatagtttaaatactatcatacatcatatcaataattatttcttaactaggtgtccgtagtttagtgcgtgaaatttgtattttagaaactatacgtaaactagcatttcgtaatatcatatctcactaaaaagtgcatatgtgtggctgccaatcataagatatgttttaatcgtctggggcaaaaaaaaaatcgtcttattcttctaagatgattaggattcgtccaaaccacacctgtttaattgaaaagaaaatggttttatcaataacaataatcaacacaattatcaaccacattttgatcatttgatgtgccagtaaatcttaaaattaattgtaccatatttaaactaaaaatatgtcatttgataaaatctatattttaccgtttttaattaaataaataactatcttgaatgtatttatgcaatatataacacatacatacttcaatatatatatatatatatatatatatatagatatctacaattaataaaccttgttattcaccaaatctgttagaaaactgtaactcgtaaataacgccggtttttatattcttgcgcaactatatagagatgttatcttcttgcagtatgcacatggttgatttaacttacctgtttttgtgggaactggtcattatcaaaaagaaaaaacaaaatctttaaggtttacaaaaaataagtatcgcacatttgactatttcttcgccgtttcaaggagggtgttctcatttgtcaattccgctgttttttaattagttataatcttttttggtccaagtatataaacaaactacaaagatgaaattcgaatatagtccagaaactcgtccagttacgtacacatctactattgtagaaaattgattacgtctactacacactctacaatccacagtatctttcaccaattgaagcaatattgtggacttgtgggcttcgattatggtcctatgggcttcgattatggcccaataatatgggtctcagtccatagctaaaaggactaacaagttgcttcccatcactaaccagctaacctccttagaaaatcatataattttcaatacttactaggcgaagatcatctattttcaatggatatctgaatttgagaacaaacaccaagatttcccaaaaaacagaatcattgataaccaagtgacctaatttcacgcttctgatttgtttctccttccaagtttcaaattaatggacaggttcatatcatcccacaccatgtgggctttccgtgacagttccaaaagaaaattggttttacgaaatgaagagccaaaaaacagaagaagctgacgtttcctgagacattctgtctcattcgtaactcttttgtttttgttttgcctttgctctgtcatttcacctcacaagtcattgcctacgtgctttcaacctctctatctctattcttttagcttcttcataccatctccgtacacgtgtcactcttaggcctttcgatctttctcttctgcagcataatcaacacctaccaattattttcagtttcggttcggtttaatcagtgtgtttttatatagtacgtattatgatttatgaatatgaatatgaaaatgagtatagggtttagtggtgtttgtctcgataaaaccgagcctcgactagggagcacatgtttttggtcagaccattttcaagcttgtattgatacaattatttaattgtctatatcacttcatttaaataattgtccatcatgtctcgatttagtagaaatcgaataaaaaacggaagtcaagatttcataagttaaaacgtgtttgtatgcatatcaaaagaagtttagcaatgagtgactggaagttaattaacataacaatattggtccggtatacatgctgcactgtggatgcaaaccggctttaaaccaacatataatataaagataaaaacacttgagaacttgattgcaatggtctactgatgttagaattatactgtcggaacaccgacagagtggtatactaccaaatctttcaaattttcacccaaatcattagcgataacgctggatttttagcgtctatatataaattagtaatttattgatgaaaaaaccactaaatacattaataacgtcatttccagtcaaatctagactaaattaaataactagcttatttatttaactattgtaaaactgctgaatttttaattgcttaacactaaaaataattttgttttactaaattagaaattttattacagtcgtatttaattagacagacatgcaaaattatgaaagagaaaagaaggtaagggttagagagaactagaaagagagagaaaaaaggtttacaggcacaaaggaggcttctctcagacgaaacgaataaagaacaaaaaaaaaagctgagaagaatccataaaaggtgacaaaagcaagaaggagaagcaaacatgtatccatatcttgtcttctgattcacacacgtactattcttctttttcttcttcttcttcttcttcatcatcattattcaccaataccactcttcttccttctcacttgttagtatactttatgtcttatctgattttgttttttacttccttcccttgatttttgtttggtagaagaaaagaatggagggtattgatcagcattactgcaacaatggtagtgggtttcaagaagagcattttctttagagaagaagaaaaaatagtttcataactcttcaatgtcgttgatcagattcatttctatgtctttaatgtaataatctcattaaacaaaaaatagtgtgacggtttgggaagtagtgatattggcggaaaggctcaatctccttgtcacattattaaatcactttctttgttttcttctctttaattttaatttagaggtatgatttcttacttcatgtatttagttatataacttgttttacatcttgctgaaaacaaaatttattaactacttaaactgtgagctttttcatatttactttccatcaattatgcaagaatttggctggaaaatgcaggatagttattttaatttaaagtaaattttttatttttgtctataaatcttctgatttcccaatttgtcactttcgaaggaattatgactatatgtatatttttattcataattgtgatcatacatgtgataatgatattgcatgtctgtctaattaattttatttataacttgatgtgttaataattactgatgtcgacccaaaaaaaaaaaacttgatgtgttttgttgacgaccacaacataggaaataaaagacagagatgcattggttctacatttctatttctctcgggaaatgtgcctttcaccaaatcggatagcttgattttttttatgtttttgtaataaattagggaaatgtaccaatatgttaaactattcacggttattctcagtcactacgtacattagtcgattattgctaatcagtacatgcttgattaaaaaacgtttaaatgatgcaattaaagtgagcaaaaataaaaagatttagaagagagaaagtgaggtagagtgtacaatgcaagaaaaatgactgttctggcagcaagctcaaaatcaatgtaagcctaaccatgatgctatatgtgaattttcttgctaatttattttgtagtatcgtttaaaaatatttaactacaattagtattttaggtttttgctacaatattcttgggaaaagtgaagtatcttgaattccctctccccttgtggggtttcttgtgttctcgaagcccaaaacaaaaaatgtcattttcacatgggtcttcgtgtatcaaccatttactagttaaacagatgtcatatatattgaaatttcccacgaacaaaagctatatagcgaggtagataataatgtacatataccgttacttagatctcttgcgatgtaagcgaatgttgttgataaagaaacacatgtacgattagtatgaactatgaacaagaaacctcgttgttggtagatataatgttctttgtcacttgcattggtttggaccaattcaacacctggatatttatgtgaaagcactaatgaatcgataacaacacagaaaattgatttcatattaaaatatcaataccatatgttttgtttcattgtggtggttaaggatttagggattaggatacacgaagaaattgagctcatgggatagaacaaagatttttctcaaacgatgttgttgattgggctcagattttgggcctgttatcccatgagcccctcttcctcatccgattaggttttagttttaacaatgcattatgtccattattttgtcaaatggtccattttgttaatgattttaaagtggtttttacatacaaatttttagacaatttgaaatgattggaatttgctgtaaaaaaaaaaaaagattggaatttaggtccgggattggtctacactttactggatcacccttattttgaaataatagtttatttcccttttttgttctacacttatattcattttggtttcaaattctctgttatttgtttcttgtgtcctttatgtcatttcttttttggtattagactattagttaacaaaattattataattgtgttcaataatgtcttcagtatgaattttcttttcaggatttttaaggtaggaaaaatatgaagtgaagtaaaatctaaaattaccttttggtacaaaatctataaaatatacacaagttcaaatcctaggtatgtactccatttgtccttttcatctttatattaagaaaaaagattgtaactagtaactactaacccactaaagcagtcagttcaatttattcctgacacatgcttacttaagtatgtagttttcttgtatcaatgctcagttgcttaagtctatgagtataatatactcctaaagaagtagaaagattatagaacgtggaagaatcaggtcgaccatatgagcaatgggaaatcgcaggagaataaacgcactccgacgaagatttccttcccctttctctctcttttttcctttactttaacttcaacttttctactccttttttcagtttaaatatattatactatatcttgaccaacaaaaataatatattatagtatatatttacattttttacgtaaatttaaaaaaccaaaacaaaagttttcatttttacgtaaattcactaacttctcacgtaaaacccatgctgtgatgatgctcatactgatattcacaagattgggaagatggtacggttgataaaaaaataagacggcaaaatgaagaatttggaaacagttaatcacacatagttggtaaaattcaattaattatcacaatatttagtaaaagctaaaatcaagtacttcaacttccactaattaaatatatgattgatgactcattctccattgctagggcctaggatgcacaacaataatgttctgctacacattgagctagtcacacaaacttggccctgataccaaaaaacaatattaacaaaaggacttcaagagaatagcatatataattggtgcaatttgtgcatatccagaatatggtcctgggaacagtaagatgaaacaaaaccttactaagagaattagagaggaaaatatccaaactttgtatgtggtgcaaattattgggaagatgattctacttttgtaatcctttcatgaacattaattatttcctcctttttccgtatgctttacatgatacttcaattttgtaagaatattggaacagatgccaataacgcattatactattgatctgcagcgagatttgtcccatcatccaatcttctccactttagtggaagatcaaaaaatttaagtcttacaaattcggttggattgttatagccacacgataaatctaactgtcatgttaaattatttgggaaatatgcaacatttttctcccgtaagaataggatttcatttatatatagaccgtgaataaaaacgattttgtcataagttttatcaaaccatgtgtgcgaataacatattatgaaagttaattagggcatttatgtaatatatatgtgaaacaaagtacacagatgcatgcatgatgtaaatggatcattgatataatgtgacataaaaaaacaaggtaattggttacaaagcatctcgatgcttacctcatcttgctcaacctaattcggcattttttgccactttcaactccgtacttctttatggtttgtgacattttaatgttgtcattcactaacattttcggtgaacacaagattcattttctttataaaaagccatacaaaatttccaataacacttgttttttgtagtcaagacctttttcttttccttattgactacgagtttgagtgcaccgttacgcacgatgcaaatgggcaatgcatgattgattatttattagtaagtacattttaacaaaaacttaaattcattttctagcatatttaccgaaaactttatcaaaaaacatacattcgaaacgtgggggtcatgaatgttcttgcagtaaagtaagatgtgattgaaagggaaaaagatagaaaagtaataaaataagataaaaagacaaagatgtaattattagacccttcaattaaattaatacgaaagtaggaggaggtgggccaaaataatgacaaagaaattagaaaggcgaaaaaggaaagaaatcaaaagtatagggacttatcataaataatgtaacaacacaacctcatcagggcaagtgtgtggattcacctatttcaggcatttgttacttgttgcaagtttctcttcgtatcactatctcatgttgtttcgttttgacatatttatacaataatttctttatatgcgaatcattaaatatcattatcattaaagttcaaatttaggtagggagatatcaaatatcaaatttcatcttatggtgaaatactgttttcattaagatggatttctttagagaagaagacaaaagaggaaagaggatgaagctattttagagtgcatcagtcctctagcctgtcactggtagtcctactacattacatcaatgttctccaatttgttttataaaatataaattatttttttacacataataaaattagaaaattattgaatgtaaacccaagtcgattttggtcaattcatcgtccatgtacaatatgcagatgtttctttttaaaaatctttatatataacttctatgtaaatttttttttaccccttctgtaccatttgctcttatcatagtttagcttaccgtttaaccaatccattttaatagaaataatagatctatcatgccggtaaaaattaccaaaaaatattgggtttagttgttaactaaggccctgtttgtttgatcagttagcatttgcattctaatgatccatttacatgattcatttgaatggtttatttgaatatgtttgtttgattatttgatattttttctaaatgatgcatttaaatgaatatttttttatttgattattttgtaattcatccacattttcatttagataaaaataactaaaatactcatgctttcactttgacaaatgaaagtattttacggttttggcgggaaaaatgattctacggttttggcgggaaaacaaaattttgcggttttagcgggaaaacaaaattttgcagttttagcgggaaaacataattttgcggttttggcgggaaaacatgattttacggttttgacggaaaaacatgattttgcggttttgacgggaaaaataattttacggttttggcgggaaaacatgattttacggttttggcgggaaaacatgattttgcggttttggcggaaaaaataattttacggttttcgcgggaaaacaaaattttgcggttttggcgggaaagtatgaatttaacgttttggcgagaaaaatgattttatggtttttgcggagaaaatgaatttacaattttgacgtaaaataatagtccgcgatttcatgattcttagaatgtttttttggtttaatatgtaattaaaatttttatattaaattagaaagttatagaaaattaacattattaaaagagggtatatttgtcatttgttgtttttgagtaaaccatctccattcaaatggtcctatcaagtctatccaaatgagtttcataattttgcttaatttttaaaaatcattgagatggatcatccaactgattcatccaaatggtctcttaaattgtcaaaagcaaacatcatttttcatctccatctaaataatccatctggatgaagaaacaaacaggccctaagtatcgtaattatataccgctttttttttttttgcgttttacatctattaaattttttgtactgttttaaaacttagtctaatttagttttaaaatttatatgtaatttagtctaatttagttttatatctattaatcggacttattaagactaaattagaaaaacatatatggttccaaatatacaaaaaaattggcattaagaagaacaaaaaagacaaagaaaaagagtgagagagagactggagtagaccagcatccaccatcccgggtccgacagtccgtatcagcatcccctgattcactctctacaaatgtcactctcttgcctctctctccctctcatttaaacgtttttcggcttaaaccttttctcagcaacaaactcatctcctctgagagagactgtttgtttgagaagaagacgaacgtaaagacttgtttactaaacccgagatttctttctttcttgttttcaaaataaaaaagcagagatctcttctccttcttcttctttttgctttgtttgcttttgctttctcttctttttctatgtgtgtttgtggtcactaccccgaaaaaaaataaagtaatgctgtctctcttctcttcaaaattattgttaacctctcgtaactaaaatcttccatggtagtagtaacaaagaagaccatgaagattcaaattcatctcctttactcgttcttgttcctctgtttctctactctcactctatcttctgagcccagaaaccctgaaggtaaaatttgcttcttttattgttactttagtttaaaaattggatcttttttctcaactctataacaaaaatccgtttttttttttttttacagttgaggcgttgataagtataaggaacaatttgcatgatcctcatggagctttgaacaattgggacgagttttcagttgatccttgtagctgggctatgatcacttgctctcccgacaacctcgtcattggactgtgagctttcttttcttccgagtttgttttctgcttttagagttcattaatggcgacaatttctctctctatctctcaatggtagaggagcgccgagccagtctctctcgggaggtttatctgagtctatcggaaatctcacaaatctccgacaagtgtaagattacgacatcctcggatcttgttttctataatataaagtttgtcttttttgcttgtttctcaattccaatttttttgctttgtttgaaggtcattgcaaaataacaacatctccggcaaaattccaccggagctcggttttctacccaaattacaaaccttggatctttccaacaaccgattctccggtgacatccctgtttccatcgaccagctaagcagccttcaatatctgtgagcttagctttgcttctctcctctgttcttcaatcttgtttacaatgtaatgatgatttgttttcatcggttcattaatcatcttaataacctcgtacgaattgaatttccaataggagactcaacaacaactctttgtctgggcccttccctgcttctttgtcccaaattcctcacctctccttcttgtgagtgtatacagatttgtcctttcacctactgaagtgttttgtttttttttgtctgaaatttaaattcttttgaaactcagggacttgtcttacaacaatctcagtggccctgttcctaaattcccagcaaggactttcaagtataataaaccttaagtttcaaaatttgaagtgatttcacaaattcttgtagttgaagtcaagactaagtcttgcttctgctttccttttgaatttgtagcgttgctggtaatcctttgatttgtagaagcaacccacctgagatttgttctggatcaatcaatgcaagtccactttctgtttctttgagctcttcatcaggtaaaagtctcgttcttgcagtgttttcatcattgtaatgatcctttcattaatcaatacttgagtgtgtgtgtaggacgcaggtctaatagattggcaatagctcttagtgtaagccttggctctgttgttatactagtccttgctctcgggtccttttgttggtaccgaaagaaacaaagaaggctactgatccttaacttaaacggttcgtcgatttgagcttgttgcttatataactttgattcaggaagatgttgagtttttagttttgcttttagcagataaacaagaggaagggcttcaaggacttgggaatctaagaagcttcacattcagagaactccatgtttatacagatggtttcagttccaagaacattctcggcgctggtggattcggtaatgtgtacagaggcaagcttggagatgggacaatggtggcagtgaaacggttgaaggatattaatggaacctcaggggattcacagtttcgtatggagctagagatgattagcttagctgttcataagaatctgcttcggttaattggttattgcgcaacttctggtgaaaggcttcttgtttacccttacatgcctaatggaagcgtcgcctctaagcttaaatgttagtataatgtcttgaaccatcagtccaaatctcattttcgatgagttttaaccaattttgtttaactgttgtagctaaaccggcattggactggaacatgaggaagaggatagcaattggtgcagcgagaggtttgttgtatctacatgagcaatgtgatcccaagatcattcatagagatgtaaaggcagctaatattctcttagacgagtgctttgaagctgttgttggtgactttggactcgcaaagctccttaaccatgcggattctcatgtcacaactgcggtccgtggtacggttggccacattgcacctgaatatctctccactggtcagtcttctgagaaaaccgatgtgtttgggttcggtatactattgctcgagctcataaccggactgagagctcttgagtttggtaaaaccgttagccagaaaggagctatgcttgaatgggtaagaaatgacactcagaagtacactttcttgattacttcataagatcaaccaaattaacattttctccggatgctgttgtaacattggtttaggtgaggaaattacatgaagagatgaaagtagaggaactattggatcgagaactcggaactaactacgataagattgaagttggagagatgttgcaagtggctttgctatgcacacaatatctgccagctcatcgtcctaaaatgtctgaagttgttttgatgcttgaaggcgatggattagccgagagatgggctgcttcgcataaccattcacatttctaccatgccaatatctctttcaagacaatctcttctctgtctactacttctgtctcaaggcttgacgcacattgcaatgatccaacttatcaaatgtttggatcttcggctttcgatgatgacgatgatcatcagcctttagattcctttgccatggaactatccggtccaagataacacaatgaaagaaagatatcatttttacgatggatcaaacaatccaatgaaaaaagctctacacttttataatatagacatgtatatggtggtgaaaattgatgaaaaatatctctacagtttgagattatgtgttcgttatgttgatgatgtatatattaacttttaattgtgagtttctatgattattttgcttcctttaacattatgatgatgacaaaggaagaaactatgagactgatttgtttgagtcttttcttttgaccagaatctgatttgctctctctcacacatactcaaaatcgtatcaaacaattcctgagaatttatcttttgtagttatcataagctgctgctttgtgtttgtggtcctttaagcttaatgtgttgcgacttttgtccaactttgactctcatgtgtcattttcagttctcatcacaaaccaaacaaagcttatcccactcaatcgaaaacgtcgtcgttctgaaaagtaacagaagagaagaaacgacagcgttttgagaagaagaagacgaaaaacagaacatatataaaaagcagaaaacattaagacagctgcttaaacaatttgggagacatggcgaatctgtcctctcttccttctcctatctattgtgtttctttcaatcaagataacaggtgagttcttcttatttatttgaaaatcgttgaagatagcgaattcgattctcttagtagattttcgaggaaaagttcttctcagataacgtaactcagaagctgcccttttattgttgtttgatggctgttcgattattgcagtggttttgcgataagttggaaagattccttcaaaatattcgattccactacaggcagactctgctatgaacgaggcaagttttatctgttcgttttggttctgcagtttctgtgttttaatcaaaagatccaacttttgttgtctatatcctttaaattgaatccgtgggcgtttataattgatggatttgatagaaaacttggttagatgaatcgaaatcttaagtatgatctgatattgaagacaacttcctgtaatgcagttgcagacattaaacacttattaatgttgtaaattttagattggttagtgtctgaatattgatgatacctggtaaaaaaagctaatgcaattggcataagatcatccttattccaagcttcaatttttactttaaaactgtgtattgaagtttttttttcccttttgtttgtttttttgttagctgctggagcctttgttattgttgagatgttgtatagctcagatctacttgcaattgttggagctggtgaacaggtttgtgcttgataaacattattcgataatcagatttgatctttgtttgattaaggaaaatttcatatatataggcttctctatccccacggcgtctttgtttgttcaagaccacaacgggtttacctcttagggaattgaattttttaacttctatactcgctgttcgtatgaacaagaaaaggtttgttaccgaacttatgacttcagattgttgtttgttttgtctttgagagtgtgaattcatggttctgtgattgcttcttatcagacttgttgttgtgctgctagagaaaacattcgtttacgacttgaatactcttgtcatgcttgatactatcgacaccgtgccaaatccaaaaggtatctcattaagttccctttgtcagtttttaccgtattagttcattgtaaacagacatgtaaatgtatatcttcgttcaggtctatctgcattctctccatctcttgaaggctgctacttagctgttccagctagtacgacgaaaggatctgttttggtgtataacgtcatggatttgcagtctcatagtgaggtttactagatgcttcacctgatttttggtttaaatttctaatttgcatagaaaactaagttattaatgaacttgattgtattgtctctctgtttgttaaactcgattacagattgatgcacatcgttctccattggctgcgattgcactgtcttcaaatggaatgtacattgctacaggatctgagcaaggaaccttgatccgagtccatcttgtttcagaagcaactaaggtgaatagtttgctcttttaatacatcaccattttgtttttctacagattcttaatcgtttctttcctctgtttgcagtcatatagtttcaggagaggaacatacccatctactatatattcactgtcttttggaccatcgacacagcttccagatatattaattgcaactagttcttcaggctccattcatgccttctctttaagtttggccataaaccaaaggttaggattaagaatcacactcttacttcccttatacatactgtgattcctaacatttgtaagagtttttcagaagcaaaaggtctactagctttcttggatcggttcttcccgacagtgtgagtgatgcactagatccagctcatcatcatgtgcttcaaaacgcagtttcttccgggattagaaggtgaaagttaattcttttagacgctgctaatgacctatcaggttatattccccaagaggtttattgtctgtctcttgcttgtgtgtacagttatgccgtggttaggaagatagacaaacttgaaggaacatcatctccatctcattttacatctcttaggtaagattttaggatatcttcattttgaaaccatggttacatgacaagttttgataatcttttacctttcacgttcttttcagagcaacggtatcggtgatcacttataacggatatttccaggagtatacgctaagtatcaataacaagaatgagtctctatggacactggaacgtgaattcaatctcttctccataaccaccgggtgatgtatacaaccaaatatcaaatatatgaaagtactgggcaacttttttgtatgtaacaatttttgtaccttgggttcattaagaatatgtttatagtctcatgttctttggttattcgcaaatataattagctcttccgtgctattactgtatcttaatcttgatttgtgttgaagaaatgaaatacaaaatggtttcccaactctttccatcatatcccacttactccatagttacagtcaaggctctttagctatgaatcagaattttcaagtcaggatcatttgtcggtctaatggctcacaagtcataacatcatcataatccaaagagcaaaagtcttttatcttatgagaattcactgtatcctactcaagactattagtctacttcatcttaacacatccattaagtcaaaatagtgtaaagacaggtacattacaaagtcaagagtatttacccattgatttgcattttgtatgtttgaagaaagatttgctaattgtgtttgctaaagatgaatgtttaagacattcatcgagatcttgtcttaacgacttgtcctctagaagcttttctctccatcttctccctctttttgcgagtcttctcatcctcaacacctccctaagttcagtcatatagacaaaacacagtccattttaaatgatcatgttttatttcccccttgttcaaagcactttgagagtattcaagacaaagtgattacctctgaaccatgtgacaatagtcccttaataagaccagaagctttgtatgctccaaatgcagggatctaaaataaaaacaagcaaaagtaaatggttgcatcattcctacagagcaaatctgttgtttgccttaaaatatggcaataaagaaaattgagatgggtatcataccactaaatacgcgtaccaaaactttccagagatgatagatccgacctgcacaaagcaggtgatgtagagtacatcatgcaaatatctgcaaggaagaatagagcatcaggcttatactatagaatctaccataaatccaatccaccataaagatgacgattatgtagcaactgataaacgataaaactcggagaaagccacaactagtaaaacatcactcatttcaaacaactgataatgaaacagtcctcctactattgcttttggttatggaaacagaatccaactatacagaaacacttgagacaaaagcaggcactttctagttgatcaatttaaaagacaaatctttccgaacgtacccacacattccaggagtgctcatgtcaaatccaccatcaagaagttcaccagcatcactaacactaggctttgccatttgatgaagaagcttatatggaatcccgtaacctaacgatgttaacacaagaccaatccaatttttccaggtatgacttgaatgcgaaattataaccctcactaggacatacaaaatctgcaaacacatattgccaaaaacatcaatcctcgaattcatcgaaacaaaatcagctaaacattgaaactttcgagacctaaagatcaaattcaacggatttttagttccatattgatacaagtaacgtatctaaacaaatctaagctcaacggattaatgtattgagaatttaagaaatgaggaacgaggaagttacgttgcaaaggatcataatgagacggagcttagccatgtgtcgagcgttctcatctttcctcttctttgctccttgattcgccatgagttaaaagagaatgatcaaagagacgaggaagatagttttttcagtttctgtaattcttcttttgctttggatcttcacaaatggtgtgagagaaaacttttaggtgtctaagcttgtttaatccaattatatattgacacctgtacctttttgtcgtcctcttttctcaaatacttttttcacgcaggaaatgttttgtttggctgcgtgtcgtaattacgcttttccttgggtttaggacaaagattcttaatttgggctttcgtctatccttatcagttgttgttggaaaactgaaacagttctatctaaatgggccagaacaacctaaaaggcccataaaatctgacatcttaaggcctatcaacagaaaactgcattatttcagttttccaataacaaggtctgtgtgaaaatcaccggcgctcggagaagacatcaacataaaaccttttaccgctgttccaaaaactaaaaagtataccatttctatgatcaatcggtaaaacgatatttataacggaacaagaacaaaagtagtgtaaatttttttccctgttttatgttgttctatagacaaaaaaaaatgaagatatcatatcttgtgggcctatatccaatatttgagtgtagcccatatttggatcaaacatcacgtcttacacaatggttctcggatatcccaatctgagtatggttttaggtcaattcaacatagtattattttgtcaacaagcaccattatagcaaaaacaaagatgtatcaaagaaaagtagcgttaggggttggtcagaaaaagacatgtttgcagtgtaagaaatgacgtggacacgtggaatcatacgcaatgcaacatgtcatcattaaggtccattgttcaacttacccattgagaacaaaactagaaaaattatagaccgttggatcatctttaaggaccatgtctgattcacgtatctctctcccacttggaatatgcttagcctatgtatgggacacattcgctaggtccaccagtatcctgtacgcaaacgcaacatcgagaagcttccgtttccaatattctatactataattacaaatgttaaaaattgtttataaaatttgtaatttgacttgtagacatcattagggtaaagatatatcaagaaattacttttttcataggaataaaaatagtcaactctcttaaataagggacaaatacaatcctctaatgacctggaaaacaactatgcaatcaacattaacaaatgtaattagaagtacaacacaatcaattttggttaaaaaattgaaagtatataaaaataaaaaaataaaaaacgtgtcttagttgataaataactcattaatcacgcctctatctctctgttttaagagtttaacagttaaagatcttcttctctatcttccttatttgactacatctccgtttattcttgggtctctctctatctctcttatccagatttatcatcgtcattacatataaacatcaaacttaacttttcaatattctcattcactttttcctcttgtgctctaattcttatccggatccgatttctctcatacaaagattctgtttttcttcttgggttattgttcttgctctgtttccgtatctcaaagtttcagctgctgaattgaatttgcattgatcgtagatgagaccaatcattaggttatcatctctcagtagaattagatgggctctaaggaacaatcaagaacgttattcttcaactttctactccaaaagccgcaaacttttgatcggtgtcaatcaaaatcaagctctgctgaatacaaacactgataattcaagtttgtattcaaggtcaagtatctttagaggcttatcagcagaagcagtagaagcagctgatcctgctactactagggtcaccgtctcaggttttgtttctctttgcaaagaaattctatcaatctcagagttcgtgtttattggtttgctgatatttgttgaatgatgacagatgtgaatagaacaggtcctcttgttgagtatgagagaagaatcagtaatggtgaactcatgactggtgatatctgccaagtatgataaaaataatagccactcttttttacttcattgaagcttttgagctataagattaaatgtgattcgtgttacttgcggcttaaggttgtgtttgaaatgttgtagattagtgcattgagagagcttcagagactatatgatgagcttgtggattcagtagatacatgtcgtttagatcggtataatacttctgataaatcctcaaggtgattgttctgttctcttagccttgacacctttccttctctgtttaggattgagaacttgagtctcacacaactgtgtttttgtgtaatacagaagtcgttggttttggtctcggctcatgccacagacttcttactcacccgtcaaaggattatacctttatggaggtgtaggtacaggaaaaaccatgttgatggacttattctttgatcaactgtaagtttgtatgatcaaattcttatccttttttttcgagcattgcggtttcatgacaattctcttgtttcattaggccttgtacttggaagaagcagaggatacatttccatgatttcatgttgagtgttcatagccgcttgcaagtatggataattgagtttccattgtttctctattgattttagtaggaaaagctttagccttttgagatacgttgtttgatttcggttcataatgtttgcagaagcacaagggtttatcagatccacttgaagttgttgcccaagagatagctcatgatgcaatcttactatgtctagatgagttcatggtatgtacactatttcatatatttattttcttgaaagtgatcatctttggatcaacacatcttgattttttcggctactgtttctgttattataggtaactgatgttgcagatgctctaatactaaaccgactctttggacatctgtttagcaatggtgttgtaagtgtcatctttacttacattatgctgctacaatcatcttaaaactgacttttgtccatgcttgctatataaaatatagattcttgttgctacatcgaatcggaatcctgataaactctatgaaggaggactccaaagagatctgttcctacctttcatttcttcattgaaggtagtctaatctactatcattagtccactttcagtacctttttaattcaaagactgcatcaagatttccattttcgcaggaacgaagtgtggttcatgagatcggttcagcggttgattaccggaaactaacttcggtattgctcttaatcccattaaaaactccctagactggcttcaaggtagagctgagttcaataactgggacacttcttcatttttgcaggctgagcaaggattctacttcattggtaaagatctttcgacccttttgaaacagaagttccgacaattgattggagacaatgttgttgcccgtccacaggtagtagaagtggtgatgggaagaaaattacaggtacagtttattataccaatctctgtgtaactccaacaacacttgtgttgtctgtatataagttcttcatcagaccaaatgctgcttcatgaacagattccattaggtgccaatggatgtgcatactttccttttgaagagctatgtgaccgacctcttggagctgcggattacttcggtttgttcagtaagatactttactttgtctctctctcatctgcaaatcttgtctctaaacagtgcttcttcttcttcttgatgttgcagagaagtttcatactcttgccttggacgaaattccagtgtttgggcttcataaccgtactgctgcatatagattcgtcacgctagtcgatgtatgcaattcctggttcttgttttgttcttataagatggcactaccaaaccatttcatcaaaatctgataatgatggtttaagaattgcaggtaatgtatgagaacagagcgaggttgttgtgtacagctgaagcaaatcctcaagaacttttggaaaagattataacaatctcagaggcgaaatcgatgggtccaagaacatcatcaagatcaagaaagaacgatgttactgagctctgcgtggataacgaattaggtttcgcaaaagacagaaccatcagtaggtaatgtaataacagactctgtgattaacaactaaaatctattagtttcattggttactcatcaagcggttatgtttattgtgtagattaacagaaatgaacagcaaagaatacttggagcaccatgccataacacacaatctgtaacactcatactagacccttgatgattcttcatgggattcttcaattaaatcctataatagcttattgtattttctgtatcacaccaacagattgatccgaaccatgaaaaggaaattgtttttccattgttgtaacattgaattttcgatttactgctatattaaatctaatgaaattgcatcttttcatgtatgcatcaagaacaataacacattgcaatattaaccagattgttgctaaacatttaagtggtagaagcaatacatcaagagcaactacgatattaaactagttttggaaagaaagagagtaggagccagtgttgggatctttaaccgccttaaagttgtccacactcattccaaatcgacccaaaatcgagtttcccatctccttcagcttagctacaaacacaaatatattcagtataaatgactgttaatgaatcgatgcatatatatgaccacgctcttgatgcatgctgattgcaaaagataataaaagttcgtgatggaatactctcagaacttacttatagcttcttctttcatcttttctcgcttctcagcagcaagaggttcaagacgtcgaatccctttcctagcttgatcatttgaaggatcaagttctaagatcttcttcaggtctgcatatgagaagacagaggctcagtatggctcttccactaaacctgatctacaaccaaaagctatctatcatgtaacaagtaccagaaactaaccacctaaaactcctagcttatttttctaataaactggtttcatgagtaaacctcaaagggaaagacttttgcttgcatacaaggtaaataaatactcatgaactcacccgtgacagcatcttcgaagtgttcaagtttctcgtgtgcttcagcccttcgaaccaaggccttattgtaggtaggatttagctctaaggcttttgtgcattccttgattgtttcttcacatttaccctgacaaacatttcacagaaaatcttgagcactatactcatcttctatcggaattcaaatagaccaagaagtaatcaaaataaaggacataccaatttgaggaaacatacacctctgtttaaatagcatatggatcgaagctctatagactcaggtaactcctgaacaagctctaaagcaaaagcatactttgacaatgcttcttcataaaggccattaacgaacagtttatttccttccgctttagcctcatttgcttctgccaaagctttctccttccaaacaaaaaagacaaatttcaataactatcaacactagctttaaagcattctctactaatctcatccaaaggttcaacctttaacagcaaaattgaaactttgtcaataggtacagttgtaatgagaactagctaataaacccataaaccataaactaatttgaatgtggattcaccttgtttgatccgtcgtcgactatggcttctccttcactcattagctcaatctgctcttccttcttctccgagtgctgtggttcctcctgactcgtgacggcgtcatttttggtaccatcttcctctccttcttcatcgctaatttcacgttcgctggcagtttcgaacccatcggaatcatctccgtcgacttgtttcgtctccgtgggttgcggtgaggatgaagacgctggctttggttcgtttttgatgaggatctcgtcttcactctcacttgattcgatcagtaccatcttcaatctaaggttcttcgagagtttgcttgcacaaagatagatttcagcgcgagacttattcgatcgtcgatctagctttcctcacaaatcaaatcagaatccagagcactcgatagagaagaagaagggtcaagatgccttgtttaaacgacgacgttatactttagctggttaaacgggttttactaacgacgttaggcaatctcaggcctggtattggcccattaagtatatcatatggttttgtgaataagatctttgttcgcaaaagtactgttcttataatttggtgtttttagtataaatccaattcacattattctcaggtaagaacatatcatttaaaaaaaaaatcataacacgttgatgattccgtagcaaaatcatgaattctgtcacaaaattgtgcatgatttcatagtaaaacaagttagtatcgtcacaaaattctatattcaacgatatgatcttaactcgtaatctagggaaacatattatgtgaagtactttatcatttgcatataagaaaagcttatggcttgctaagaaaatcatctttgttttcaaccataatttgaaaatattataatttctacatataaaatcaaaacaaaaaaaactctttatcaaattttttagtataatagtatgtgttcatataccaatacaagcacaatctttcacgtaatgcattcatattattattgcacaattataggaaacatcgctttaaaaggttcgtatacgacaactctcccaccaagatttaatatgtttaacaaaaattagaaaacattcatattgtgcccccagccaaaaaaaaaaaactactcatatactattagttataaaatgagatgaaatgtgttttttttctttctttttaatagttcacaagcaacacatgcatctatgagaagatcaatatacaaattacaacttttttttgtataatctcgtctctttcaatttaaattgtgaaatctttctttaacaagcagagccagcttctaccagcttgcttaatttgttgttccttaatctttcttcgtaaacttcacttccgtgcatctcattctcatacctaattgacatatatagtattagactataagttgcattaaacaataaatcacaagatagaattaaacaagaaactgtacctcggtggcataggaatcaaaggagacaaactctccactagcttgagagcttcttcttctgtgttgacgatttggttgaagcagaagtatcgaccgcaagctgaaacatcctcgaatgctctaatatgaacgtccgctagaaacttaacgtctacataagctaacacaccattctcatacatttgtgcagctcctgttaccaaaaacactatttcatcaaattcaaatcacaattgatgaatatgaattagtatgtctcgttcttcaacactatgattgtttaaaaacaaattccagttatgctattaaaaaagccttcttaaaacattcacaaaaccttcgcaactaattccggaactttgattaaatgctcataaactcttttgtgaggtttatgaaatttctctatgtgtgtgtacctttaaggtatgacatggtgggcctagcgttgtgttgtgcgacagatggtccgacgacaagaccagggttgatagagaccatgttgagcctacggtccatggctaatgcccaagctgctttctccgacaacatctttgccagtgcatgccacaactgcatccacatacagtttgttagcacgtgagtttgagcttgtactaatactactacagtaaatagtagtaacaaacaaaaagagagggtaatgaaattcctaaaaattgcagcaacaaaaaagtaaaggaatagtcttcgatttcgttttgttgactgttccgtttgatgacagacagctatacacgttaatattgtctccgaataatttgttgcataaagttagctaagtccagtaatgacaatcataattatatcaaaaaaaaaacatgtcaccgtctaatctaagtgatagtcataaaagacactactactaaatcatctgtatctaattattcaaaacatgaaggaaaaaaatttaaaatatatgccctttaaatttccaaaaggcaactataaccgaatcaagagttgtacaatgtatttaagagtcatggaaatgaatatattcaattaacctgaccccttacgaattttctatgtcgtccaataaaatgattcgagataatgtgatgatacatttgatgaagaccaacatttgactattaaaaaaataccacaaaataattccttatatagtgtttcaaaattcaaaatttatagaactggcttccttttttatatgtataataaataataatatgagctagctacattaaataagatgtcaggaaataattagttattccaatccagcttataatatttaaattgtgggtccaatttattccccaaaattttaaatttcacttaaactaatgaggattaatatttaataaccaaaataaataaataaagaaaaattagaaaccttcttgctgcgacagaagtcttggtcactccaacacttctcatcaacatccttttgagttccaatgttgtctctccaaattgaagctgttaatgaagaagaaaacacaatcttctctatactctctgttcttccacacgcttccaccacattgatcgctcctctcacttccaaatccacctccttctcctatgattgatgataaattcacacaaatcatcaatctcagtttcaaatttcaatccaaactcagaacgaatcaacacaaaacacttcaagatgaattagtcactcacatcgtacccttcagggctgtctaagcaacagaagacaacgttacatgtcttgagagagacaagtatgctttgataatccaacacatctacatcgtacaccactaatctctcttctgttgtttccatctctctgatcatctcctcaatttcactctcccctaattaccaaacacatataaaacaaatcaagaaccaaacaaagacttcgaaatcatcggaaaaaaagaacaaacccgaaatcattcgtgaacaaacggagaaagataccgtttctacgaatcgctgcgtgaacagagtatcctctgctaagcaatttcttgagaatccagaaaccaacataagtggaagcatcaagaacgcagcaacaagaagtagacttgtcgtgatccatatttgtgttgcttctttctgattaatgattgaaacagagagagtttaaacgaaagcgtgtgtatatgtgtgtgatgaaggagaaaaagaaggttagaagtaggaagagagaagaggcaagtattaataggagaaagttgggtgaactatttttctgttgcacgttcccagctactcatcttttattatacctcatctcttattttccaataaagtattagtactatttcttaattaatcattttacgtctctaaaccatcttaattaattgcttggttatccaatatccacaagtcaatcccttattggtttttgtttacgtgttgacaattttggaacgtgtgtcttctttcagaaacactccaaaattagtagcaccagctaatatcaaattccaatcttcttatgttgtttcttacttactgaatactacaaatatatgtaaccaaataaattaaaatggttttcaaattaccaaaaaaaaacaagaaaatcaattagatatcggcatcggttcaaagtttttcaaaacaatccacctatattacacagtactttaacccaaactgtacaccaaacttaaagatacttttttaataaatccaagcgaatttagacattcgtttgtacttgatactagatttgaaaaagaaaaaaatgtatttgaaaaaatgtagagactgtacatatcaaaatgtgatgcgtcgtcatatttctttagctccatgaatatgtcaaaattctcatcgaatagttcaatactaaaatttgggtgatggtaattctataataagttctatttatcgttcaaactacaccagttatatgaataaaactgctggaactctcctgatattgttagatatgagtatattattaaaacaatctgattatgaatgaaagatgtagttacagttgttaggtttgagaacgccagaatggaacaaacttcggtcggcaattgcataagcaaaactcacacaaaggtggctttctaaaatttaactataatatagaatttcaagatttgtaaaactaaaataaataaataaaaaaaagtagaaaaactaggagaaaatataagagaagaactaataaaagcaaaacagcgaaagggcgctggacgtaaagtagttagcagttagtaggtagagattgtggtgggatgagaatttacgtggggaagtttcatcacaagccacacaacctaccacgtctctagacacttcattttgtataatctatagttttttttaattgtgaaatttactcttaaaatgtttccattatactctttacatacttttttgtaattaacgaacgatctatatatctttttgatcgaaaagttgtgattatcaaccctaaaaagatccaaattaaagatgtcttgaatgttatggagatgttgtattgacttgtacgtgctttaatgtgaattcattagttataaaattaggttacatgttaggtctagagataacatgtatcctactcttattttaatgagaatgaacataattctttcaaatacaaattttttagcgtcactctaatactgatgattaagtactgcggcttgttataagtgcatttgcatttaattccgcaagtttgcaatcattcgtctttttttttgtaagggtttttagccattcggttgcaaagttgcaattgagctgtgaaattctggctcttaatttcatacagtgattcaactatttgatttgatgtttcttttattgatgatgatgatgactgttgagaagaaaacaattcaataccgctgcatttatttcttttctaggtcaacctctgtttttttttgtttttaaaaaaaaattgtttacaatgaaactaactaaagaaaataaaaggttaaagaataaaacttgtgtgtggctaacgattgacgaatcaagaaacctccgggcccaatccgcgtgttaacttgaaactggaaaagtgaaaaagggacgagaagagagtcgtcagggtaacacacgtgccacaatctcagatgttttcgtacttttgccatgtaagaagatgatgaacacttcgtgtccttctgaacaagaaaaaatcattttgcgagaaaaaaaacacaaaattggtaacgctcattgttcaattaaaagctcaatgaatgaaactgaactaacttagcgccacgtgttcataaatcaggatcgtaatttgataaagaccacacgaaaattgttaatattataacaaaaattgtttcgattccttcttttgagttcagaaagtaatcgcattttccgtttacctaattcgattttcctcttatataagaataaaattggttgaataaggataatgatatagttgacccaaaaataataaaaaggatgatgatgaagttactagtggttaattatatagtagtatatcacaaacatttaattgatattatgagtataacattgtttatttcaagcattatggctagttccacgataaaatatagctacttccatgttggcctttatgcagaatattgaagacgtgtatcgttctcagtattgtcgaaacaattcattcatgatcctaagaaataagcaatataagaagatgtcgtgagtgtgaaagggtttatgttggtcatatcttactatgtcataacatcattttaagagcagactccaaagtgagtggcgtagggtgtggagtgcggactaagagatgagaatgagatatgcaacattttctggttctgtgcgaaaaagatcctgcaacatttggtggatgattgattaagagtattcatgagcggcatttcatggaggtcactttccaatggaatgcaaaatagtttagtggaagtacatattgaacaaggcagatagtttgctggttacatttagaccgagatacgccaataaattaacatgaaaacaaaatcctttgaggaatatgcacttgcagtagattcttgtgtaccaaattggttctgatgagaaaagaaagatagtggaggcatgagaaagtatcaccggccaaccatctcaaggccttattattgtttcaacattgttcggcccaaatatctctgggtcaagtccatgcatatatttatagccaccgaatttacgtggtattaattgtctttttttgggtaaaatacgtggtattaacttccaaccaggggctagttctaaatcgacaaagattagtaattaattcagtaagtttataataagatcggtctgtaagcccagttaaacttaaaccatgttcaaatatatgtaaggtgctaataaaatgatataactacgaagaaaaaaaaaaactttctgagcgatcaatccatcaagatttatcatccattatataatataagatgtttttagaggaaaaaattatataattagatgatgtttttaattttagtacaatttttttttgatgagattaaactaaaactccgaatcatttttgtgaaagaaaaaaaactgttaagaaaaacaattcttacaaaataattgttaaatattaaaattagatgcatgagcatgaccgacctactataggtccacttacggagagatagatagtggatcagacaccgaaggactgttcattgcaacgttggacatgtttgaatccacatatttattttcgtgcaaaaacaatcatttacacgtttatcattttcttctcgatctctctcttcatctttgaagtaaaaaacattacgtggatggaagcaaccagaacttctctactttagtttggtttaatgttgaaattggttcaagggaggattagcattccagtttctgtttacgttccgacggttcatcgtcatacttagacattctcgatttctctccaacctcgcttaaaccctaactattctctacaataatgatctgcaaactatgtttgacgtacgagagctaaggctaaatgaagcaatgttccatatcaaagattctggctctttgaaacagaatgaagagatttaatgattaattattgatggctacgcccgttactccaaaaatttaaaggtccaaagacttcaaaccaaatacagcgaatttttttaatacttttcaatgaataccaaattcgtgacaacaacttcaaaactagaatagaaatcgatttgggtgaaaatcaaatttagggttcgtcaagaaacctgagatcaatttcgactggatgtagatttggaggattcgagcaaaggcaaaatgaagttaatagttgcgtttaaaaagaattattaatcatttgattttaatgttgattgaaaagaatgatttctatttttttatttttttagaaataacgtgctgagttgtgattaataaccaatattgtaacgattatgatgtggaaacaacttttgacttgtaggattttcactaccatattaatatgctctggaacgcctataaataccttcaacatacatattgtgtcatattcatcaagagcactgcaaaagcactctaaattggggtgaaaaagcattaccaaacaccaaataaatatgtctgatctgaataactcatcatcactcattctaataactttgattttggccacatcagttctagtctccgagagccgggtcgcaagaaaagacttgggtttggaccttggagggatcggtgctggtataggcataggcataggtatcggtggaggtggatccggatccggagctggtgccgggtctggatccggaggaggaggatcaagctcttcttcctcatctagctctagttcttcttctagctccggtggtggtggaggtgatgcaggatccgaagctggatcatacgccggatcacatgccgggtctggttcgggaggacgttccgggtcaggccgtggaagaggaagtggaggaggagggggtcacggtggaggaggtggaggaggagggggtagaggtggaggaggtggatccggtaacggagaaggatacggtgaaggcggtggatatggtggaggatatggtggtggcgacgactgaatgaagaatattgcatgcatgcaatattgtgttttatacgtaattatattatgttattagtatgagaaaaataaaatgcttgaaaagtaaactttctaaagtgtgtgagtacaggagatggaaaaggaggaattctaatgtgtttggttcgtaattatatacccttccatattcgaattggattcttggtgttgtatatgttttacttttgtactataagttgtaatttcccaatttaaatgttatgtactaattttatttcgttgtttcttcctttttttccttcggtatatttcgcttatagcagaaaataacacacatatatatatataacgatataagttataacacaaaatatgattgtatgtatatcaaacaactgaaagagcaaacacgatttggagactcgtcgttcagctaaacaaaaaagacatcaaccaaaaacaaagtttatagcatgaagccatgaacacaattcagctctgttttgtttcttttttgaagaattcgatttgcatttttaggttttgtcatgtgttacgttcaatatcttagataaaaacatatatgtaaaataaaaaatgaaaaacgaaccaatccgtgatatacataatttagatatgtattatctgcataagaacttctgataacttaagaacacctcttacaatttgggtataaactttaaactcaagcattagatttagaagtcgtttacataatttaactaagcaaacgtgtttgtattagatccaaagaattaaacagcatgatcgttattataattagaactataacttactattagttgaatccagtgactaaaataaccttattttaatttacacctttcttagttaaaaaaataaaccaaacactgattcaaaatagaaaaataactgtcagagaagaattttctctttaatgacttttgtattctatatgaggattgaacattatgggttattcatagcaataaaaacataaccaatgtgaatgtatagtttcgatctttctcgaacaatgatttaagcacgtgtcgtaggttgaataaataattcatagtggaaccatagattagtgacctgtacgagtgattggtttcagcgtgcagaatccactacctcgcttccactcaatttagtggaccgtcgactctggtgggtttggtagcagcagaagataatgcacacattacctgaatccacatttttaaaatatgcacttgccagttctattatcctgaaagtttcgttagaataaaacgcaagcgaaataataatcctatcaagcattttagataatcactcattcactctatgacttgtcattgctgatttgcggtttgatgcaaaactgtggaatataatgatttaaagaaatttataatgcgaaaaccttttcatcgtcgtggtagaagtgaaacctcaattctttttacaaacgctttttttttacctcaccggtggtttaagaaaaccttgcgaaataacatggattaagctaagatttgttcttacctaatttgtaatttatcacattcacaccccggattacaatttcattttgcatattaatattgccaatcaaaacatacatttaactagactagaaatgtgtttaattaagtattcgtagttctcttatctaaggtagtatgcgtaaactatagggtgaatttaatatatatgctcagaagaatgaaaaataaagaatctgaccatgaagttttgttatttagttctctttcatctgattcacactaatgccaaatatacccttcgtcacatatacacgttaacaagaaaaatatcaagataaaacaatttatatgcaacaataaaaaatgagtttcggcggtaacaagtttaggtagttaattatttgattagtatgataaacatgtctttaaaatatagtagcaaggtgaaagcactattcatcttacgtcgaaaacatgtttctcgtgttaaatcttgtattatataatatgtattatataataacatatttatttattttggtaatttaattattattgttaatttatacattaacaatttagttatcaccctaacatgtcttttaaagtggtaaattgtatgctacttatagataactattatacataacgaattattattttttatatcatgttaacattcagtaactaataaattaacaattatctattcttataacatattaatttatggattagcttatttatttatcatgctaatttgtttatcaccggtaatttatgagttattatatacgttaaacttcttcttctttttttcttctctttcattttcaactctttttctcttacaagggtaaaaatgtaaaaacatcactctctatcttacctatctaattaagaaaaaaacatgcatatatacttaattattcactcttcaatgcatatccattataatttctctaaactataataaaacgaaatatgataaatgtacgtaggttaaattaattatggtgatatacacgtagcggctcacacaatcccaaagcttctataaatacacgaacatgttattcatttttgtacctaatcaagttacactataaactcaaacacatctatcggcaagtcttaacacacgaagatttccaaaatggctaaggccgaaggtctttttcttcttggtttagtagttatttcaagtttagttatgttaaccgagagccgactcgcaagaaaagacttggggattgacctaggtgggattggaatcggtttgggcgttggattggggattggtcttggcggcgggtcgggctccggtgctggtgcaggttctggatcaggttcaggttccagatcatcatctagctccagctcatcatcaagttcgagttctagtggttcgggtggttcagctggttcatctgccggttcatttgctggctctagagctggatcaggatctggtaactaaattataataattacttttcgacttaaagtgtgaaacaataagtatgttttatgtttttggttcgtcgtagttaatatcgtatgtacggaatggaatgaataatttgttaccgtaagttatgttttgtttgagcgagtgtgtgtacctagcttactctctctattcaagtctttcaccaaaagtagaatctctttagatttggaacagaacatgtttgattaatcgtaaattattggtaattcgaatttgagattaatcttcaaaaaaagaaaacaagtttccaaattttttaataagttaatcaacccatatgacccacaggttatagttaccggatgaatatgggaccagattttgatatcaaatattattctccacattgaatataacgttatatcaatcgagttagtgcatctaatgatgatagtatgtattgtaatagaaacttcaatctttttaacgattgtgtttgtatacgacacgtttacaaaacaaagttaacatgttctttgtaatccccaagtaaataaatagaaacgtctggatagtttatgaatatgttcaatatagatgaaccaaaccgaaaacatcaaagttttgatatgaaatttagttaaaatttgatttcttttatttttattatgtatcctcaccattaacaagcgtccacttgaagaagaaaactaaaccgggaaactattgattaccaacaaaattataaaatacaacaaataaaataataactttcttacaacacaatccaacatactcgaaggcttacaccaacctcagtgtaatttggcctctctaggtatgtcgcaaaacctaacccaatgataaaagcgttaaactatcctagttttttttttctcttttcttaattattgctgttataatttcaaaattacgtataatattgaagcaatgcattatgacttaagcaggatagcttcaagacaaagtttcaaacaatggttaaatagtgctatgtataagtagctcgacggatcttaattgcttactccattatttttagaaaaatataatttgtaaatcaaacaggatcttgcaaatcttttcttgcctgaatcaaattttagtttagaaacaaagaatcttctttaacaattaaaaagaatcttccccatatatataaagaatcttcccgaataaacaaaaaataataaaggaagaaatacgaaatagccaaagtcaacgtttcaggtaaagagtaaatccgaaataccaaataacgaattcttataaaataattcatacaataacaaaatatatagaattataaaagaaaaacaatcatatcacacaaaatttataagattatctgtgcatacacacacaaaaaaaaagatgtcaaacacttacttttatttatcaacaataaataaataacgataatcagttctaaaaggaaaaaaaatggtgaatgtatgaaaaataaagtaaatagcaatgcaccgcccaaaattactgggtaatgccggtagatacaaaatctggaaaagactgtaatccgatacttccggttcccggtgagagatggcccatcccttgtctttaatggtgaaaccgtgacttggggaagcggtaattagagaaacgtggaaacggcacccagttttttttgtatcaacatgtcattctctaatcgctttcgcaaaacagccaatggtgattgctgtggtctgcacgtcctcccacacattatcctgtttcaatatctgcaattttctttttataattttttttattattacactgattaattaaaataaatactaaagagatctttttatatttgagtaataaaattttaaatttattttgaccaaagtgaaaactaatatcaaaatttagtacacgtctttctgctgagtgctgaacttgacccaatgcgggccagtcagcaaaatatcactagtaaaatttagtaaaatacttttatcactataattgagtggtaaattactttactaaattagttcacattaattacttttgctatctgaaattcgaagccacactgctgctctaaatgcatacaccattacatatcacaagaattacaacttcttgataaaagtttttaaatgccaccgattataaaagtttttttttataataaatgtgaatgtggattgaagataaattacctttttatccacggaccaagccttgcgatccggactttgttctattagagcagcatcctaaaaaacaaacctcacccggcgatgacctaggcatgtggtagtctttatcaagtttagacaaaattagttgcaagttggtcgcacgttcttgtttacaattttttaattaaatttgattagagattacatgtgttaattgttgaatgagttatgagtctttttttagacgctttctttcacacattatgtatgatttcaatttgtatagaaatgcaaaatatttcaactcataacaaacaatacataatcgaaactcaagtgaattctttcaaacttcattagtcttcatatctcatacttcaacattctagctttctaagctttaacatggagaagaaaaaaaagacgccataaaattaactatgttttttaaaactccttaaattgcggtaaattggtgaaaaaagattgcggtagatttagcatttatccagtttttcaatacataattagtagattcttttttttactttctctaaacaaataattaggattgtttttttttgtcaacaaatattaattttgttataaaagcaaaaaaaaaatgacaatctggcaatcaaattaacgcgtctccttgtcccctaaccccacctgtatatatacttctccgtctcttcctcttctccttagcagatgcttttgggaaaaaaaatatataccaaaataaaagatctgcatctgtcttcttcttcttcttcatttcctctaaatttaattacccattttttccgataaatttttgttgaggaagaatttttgttgtaaagagagtttaattaaattatgccttcaatagaagatgagctgtttccgtcaacgccgggtaaattcaaaattgaccggtcaaaccgtcagctccaccgttgtttcgcttctacgagcaccatgtttctttgggctctcttcctcatcgctctcaccgcttcttacttgagtttccaaagcttcgtcgattccggtagccgttatctaaccgcttcttggggcggcatccagtgggagaaacaggttcgtacctccgctcagatccatcgctccggcggtatctccgtccttgttaccggcgctaccggattcgtcggtagccacgtgtcacttgccttgaggaaacgcggcgatggtgttgttggacttgataatttcaacaattactacgatccgtcgttgaaacgtgctcgtagatctctgttgtcgtcgagagggatcttcgtcgttgaaggagatctaaacgacgcgaagctgttagcaaagcttttcgatgtggttgctttcactcacgtgatgcatctcgctgctcaagctggtgttagatacgctttggagaatcctcaatcgtatgttcatagcaacatcgccggacttgtgaatcttctcgagatttgcaaagcggcgaatcctcagccggcgatagtttgggcttcatcgagctccgtttatggactcaacgagaaagttccattctctgaatctgaccggacggatcaaccggcgagtctctacgccgcaacgaaaaaagccggcgaagaaatcacccacacttataaccatatttacggtcttgccattaccggtttaagattcttcacggtttacggaccatggggtagaccggatatggcttacttctccttcaccagaaacatcctacaaggtaaaccgatcacaatctaccggggcaaaaaccgggtcgatttagcccgggatttcacatacatcgacgatatagtgaaaggatgtttaggatctctggattcatcgggtaaaagtaccgggtcgggtggtaaaaaacgtggagcagcaccgtaccggatatttaacctgggaaacacatctccggttacagtaccgattctggtggatatattggagaagcatttaaaggtgaaagcgaagaggaacttcgtggagatgccaggaaacggcgacgtaccgttcacacatgccaatattagctcagcccgaaatgaattcgggtataaaccgacaaccgatttggaaaccgggttgaagaagttcgttagatggtatctttcttattacggatacaatactaaagccaagcttgtacattaaccgtgactattattattatttttaatgaaattatttttttctttctcccatacattttatatgattcgtttcttttaggattattataaaatctaaatgattcgtttctcttaagacaagcaaaaaccgaaaaaaggacagcctattataccgcgttaatttaaagttaatcgtgattgtgttaatcttgaaatgtatttgaacatttttgttttcttaatacagaattgattgatgtaaggcagcaaatattttcctaccaaaataatttgttagggatcttttagaaaaagaaataaaataaaaaaaagggaataaggacagctgggaagagtgggacagcagagaaagtggtggtgtacggtaaccgttggatccgatgaggaatttaataaaggtagtcgtaatcttacggtccagctgtgaagtactcatgccacgttatcttctccaccgacagtacattgttactatagcagctatagtatagcctattcaatcatttgtattttaatggtaagcaaagaggaaactatgtagaagtttcttatcttatagtttctcaagtcttttagttttggttccataatcctttttttagtatgtgaaggtgaaggtgagtttagtatgtgatttttagtatgatttggttgataacgttttcactcgactaattatatacttcagaaggatagtaatagaataccaaaataattaaatgattggttagtgccttagtggagactttttaaccgattctaatagactaatgatgtagctaagcatttatttgggatcatcactgtttgaaaacgtgaaatgtgataaaagttatgaaacgattaaaatataaaataaccgtacaaaacattatgtaccgtttttttctctgttcttttggcgatttggtttagttcgttacactctaaatgttattgcagatatatatataatgatgcatttgcatctgaggaacatataattccggttaacacttccaaatcttatatccgtctaggtagggattttataaatcatttgtgtcatcatgcgttatgcttgtcggctttgaccataacgcagagatatagaactagcttttacttaacttttagatttattatttgatctagagttaagtggagatatatagtgtttttgttagattattggtggatgtgagagtttgtctttagtttcaagttgagaatataaggcaagaggagactctgaggcaatcagaggttttgattggcaaaatatccaaaaggcccaaaccaagtcgaagcccatctcgtacaaaaaaagaaagagatctgtaagaaaaaatattctttgatattcttacaaaaataagtgtaaaacttttattagtcaaaatcttcaatctttaaaaactctcatcactcctacgaaagcgcgtgagagttatgagacattccttaatagcattactcacaagtcacaagttcaaaacgtctgactgaaacagaaacaagcctttgttgaagtcttgaagaagagacattagtactcgtcgtatagccataaaaggtaatatacgaaatttcttcgctaatctcttcaccttcctctacgcgtttcactttcactttataaatccaaatctcccttcgaaaacataatcacacaaatcccttttttggtttctccaaatcttcaaatcttcttcaatcatcaccatggtacgttttagtaacagtcttgtaggaatactcaacttcttcgtcttccttctctcggttcccatactctcaaccggaatctggctcagccttaaagccacgacgcaatgcgagagattcctcgacaaacccatgatcgctctcggtgttttcctcatgataatcgcaatcgctggagtcgttggatcttgttgcagagtgacgtggcttctctggtcctatctctttgtgatgttcttcttaatcctcatcgtcctctgtttcaccatctttgccttcgttgtcactagtaaaggctccggcgaaactatccaaggaaaagcttataaggagtataggctcgaggcttactctgattggttgcagaggcgtgtgaacaacgctaagcattggaacagcattagaagctgtctttatgagagcaagttctgttataacttggagttagtcactgctaatcacactgtttctgatttctacaaagaagatctcactgcttttgaggtaaccaattttgaaactctttctaggttatttgatttagagaaattgagaaatgtcattttttaaagggtttttagtctgattcttttcgtctgcatcatgaatttctacacaagttttgatttttgtgttctgaaattttgaagcatgtgcttttgatccgtggagtaataccaatttcaaagctttcgatttcactcacaaggctttattgttccctagttatatgtcatgtgattgcttgttttacaaacttgaggtaacagttctgagtaattttgaaccaatatgattagacttgtgtaagctcagtttcagaatctgatcgatatatcaaaaaagttacttccttctaaaggttttagtcttgacctttttcattattctaattctctgattgaatcttgatggtttattttatacagtctggttgctgcaagccctctaatgactgtgacttcacctacataacttcaacaacttggaataaaacatcaggaacacataaaaactcagattgccaactttgggacaacgaaaagcataagctttgctacaattgcaaagcctgcaaggccggttttctcgacaacctcaaggccgcatggaaaagagttgctattgtcaacatcattttccttgtactcctcgttgtcgtctacgctatgggatgttgcgctttccgaaacaacaaagaagatagatatggccgttccaatggtttcaacaattcttgatttgcgccggttcaagctagactttgatttttcattaatacatcatattacatttatgattagaacaaaacagctttcaaaatttaagaaacagtagaatggaagaatattgaattagtatagttgttgatgtgtttggatttcttctgttgatttgtgtttggacaacagaggattcttcagatctttattacagattgttgtgtttgaagaatcttctatatgaatcttcacttctgacttctgatcattgtctctctgatcttgattcatcatgacatcttttgctttaccccagagcacagtgtaaagtcccaatatcacgcccaatcctccgattaaactatttcaatagatcaaaaagattaagtttatggattgtagtttatctcaagtttttctatcaagtatatatttcgttaccttccagtgtaaatctcttcatggaagaacaaagcagccaagattgtgacaatgactgtacaaagaggattaaacagtgcagaaaacacaggacctctctttgcaatagcccaagcttggaccgtaaaagaaagtgctgacgccccaattccctaacaaatgcattagtgtttacgttaatttttggattaatcaacatccaaagaaagacaaaaaaaacagaggaatgttgtatgtgcgtactgcatagagacatgtggcaaactcggagtaggaatggagaatccaagcgtttgggtctttctcaaggaagaaagtgacgactgcacattgtattgttccgaataaacacatccatgctgataaagagaggttatctggatagtaggcagagattggaacctagggttttgttgaaacaaaactcacatttcttgtaagacaagaaacataacaacaacaaaaagtttagacttttgatttatttaatgaagtttacctgaagtataagccaaaaggaccaacaaagagtgctagaaaacaagaacaaacagccaatcaaccacgtgttctggtctttaagatgtcctaataccgatttagcgatcggtaaagcggattctgagttgagaatctttggtccacgaagaagagtcatggagatcgctcctgctacacataggatcgtccctgcgatctttgctaagcctcttatatctcggagattcagtttctcgtatctaaagatcagaataaattagtatttagtaagtaagtagcacataaatcttgttttcacaatttccatataaatgtgtatatgcatatacccggcgagaaatgagatgaggaaggtgattgcagggatgatgttacccactgcacttcccattgatgatgaagttaagtaaagaccttcaagatatagattttgattgattgtaatgctgcaaacaaataatgagaataagtaaaatggtccaagattcatctaattggagttcttaagaaattaaatttaatatacacttaccctataagcgagaccaagaatattaaagaaaagctctttagatccaaagaagatatagctatctttgattttctcctacaatcccaacaaaaaaaatccatcggccagcaaaaattaactattttagtatgtcacatagaaagttagaaaaaaacttataaataatatatactatacgagatgtgaaccaattcactcatttccactttttggattagaagaaaaccaatgaaacttaaaaaaattgcatattcggatatggagaaaggtgattctgaagcaaataaaactcttaacaaattgtaaattcacatttccatttgggagatagggatgggttaatgggtttaattacctggataagtaaagaaatgggaagatgaaaatggtggcaaaggcttgcctatagaggataaaaacccgagggcttaatccatgaaccaaagtagctcttgcaaagagagtcactcctgcataacatagttgaatcatcgtcatcgccattaccggcttgtactcctctatcttccccatgatcttctatctttctttctcctcgtaaatcttactttgcgttctctttagatcttaagctatgtatagtagtgtatatactgttaggacgatcttgttaattatataactattaatcctcatgataatagttaattatatatgcttaatgaataatgttttattcggttggcgaatacgtacttctttgtcttatggtggttttaaatattcatttggtttttggtcgaagttagatgtactcacatcgtatcatcatctcttgttgttggagtgaacaaatcctttacggaagactaaactatatttgtgttaaattatgttcaaaatcaaattacgctccaacgattgtatcgaggttacaacaataaatttacaaacgggtttttagagggaatgtctgaaatcggtggttagagtgaattggcaaaacgaaaagagaatgcaagagaaaaagaactaggattttgaagtagacggcatttctctctctacggataatgacttgtggcccggatcttgacaagagtcgagtttacctaactacatcaatctatgaggatttgtatcaatatcggctagctctccaatttcatagatccattataaaaaaaaactaattgtcaaaagattacctctcactataatgatctaaccacagtaacgcaacgaatgtgcatacgtaatgataaagttcacaaaacacgtttgcaagcgtttgatagcataagccataagcggtagtgcttgaaacttgaaagtaaatgaacaaaatggatcgtatatatatataagaaaataaaaatcaaatatgcatcgttaaccataaaattacaaatgcttagtttaattattgagtttaaggttagaaaagaaaaaatcgttatgccttacgttactacatatatactattgaaaacttttgaaacattataaaaacttgttatatggttgatttcatatacctactacaatcgctattgtcgacaaatatagcatttataaactatggtggctaaatcaatcagtttgttttaataccactaacaatttgttaatcaaaatcagatgtggctacttgaaactgtctacgccattcaagaaaactacagcttctttctgttaatgtaaatttgattaactacagcttctttttgttaatgttcgaggttaaaatcaaaattttggatcttagtacaagaaatctgataatcttaaacatgacagctctttccacacttggtcttagtacagacaagtgagtccatgagttagcactaatttcttgttttaaattaattgtatatttgtttgatcaatttatattagttgtagtgcaggtatttatttaatattatcgatctaataagaatatctgctactacagatctagaagatgaactaaaataacactctaatgcaatcgtaatgcttcaccccaaatggccgttcaattaatatatttctcaaccttcgttttttgttaaatttggtgaaaacaattatcaacgacactaatatcattgtataattttcaattaacacacttcctctttgtcaaaatagacgatatttagctagaacttcatcgtttcacattgatcatttcttggtgcagagagggagtcttaaacaacattatgagagatgttaattagagtcttcttttctagctcctgatttcaaatgcagaaaaccaaaagggaaaaatcagccatgtgtttgaattcaaagaggacaatgaggatgccttggacagatctggctgaatcatcagaaaatatgaagaagtaatgagtaaaacaatgatgggtaaaactttgattattcacaattggcaccctatcaaaacatctgcttcctctaaagtaactatgaatagctccattaaggaacttaattagagcatatatataatgacagtccaaaataaagtctccctcttgtagtattaaatgtcttagctatatgaacttaacgaaagaaacttcccatgtgaaaacacccactcctccaacgtcactaattaattagcaactagcacaattattaatcacaattcatttttctctctccatgttatgcactaatgaatcttgttttagcatgtttcacattgattgttcgggttgttaccattttaaataatgatatgtttcaattcacaatttcatatagatgacttatgtacgcaactatgcattttcatattttattcttaaaaaagtatcggttcgtagtaaagtctgaattaagttttttacttttgtccttggaagagtacggaagaagacactaatctacccttgatttaaggagacaaacatatcattaaaaggagattatgtttattgattttagattataccctaaacattatccaattaaaataaaaacagttactttaattgacttttaggctgtatcggtcgtagactcgtagatagcagtagataccatgaaactgaagctaatccactcaccattccgtcggttcttctacctttttaacttcaaattatttcacatggcctacacatagactatagtatacatttatctaagaccatgcgttatatgattatgataagaatggagctcgtaaatagtatatcagataaagttgaatgaaaaaaatagttgatcggtaaaataatattatacttgattaattgaaacatatattgaggataagctagagttaccatttcctataactattctacttagattagtactcttcgtatgaatcatatgttacattttatatacactttgataaaactatttgttttacatataattctgttttgcatcaatggactctcactattgcatcttgtgaactcgtctgttttattccccatgatgagtgatgaaaccatcagccacgccaccaatgatctcaaacattatttttatattatagttacatctgtcaacactcaacagtaacatcaatgtattgttctgcaatgtcatctcacatatcttttgcaaattcaaaaagtacgagatatctctctgtagatcaagaccatttggtgttctttgattcaagacactagaaacaatttgattgtactataaatcctcaatttttggaagtttatcaactgttaggacaatcgacctgtcagtaaatctgaatttcttatatgatagtaaatgattttaaaacatatcacagccgtcaatcagagagactgtgagagtcaccgttgaaaatcactctttggtgagtgaaaaaatgtaaaagtaaaagaaccaatgggtaagggtccctccacgtgtgcacatgcgcttcggtggacgcgtgcatgcaagagtgttgccacattaacgacgtcgtagaatgtgattaagggcacaaaacattttaatcaaagaaaatttgactgatggtgacgacaatgagatggtgggcgtgtagagttcggagaatgattgttgagattcccgtaaattacggaggtccattggaaaacaaatccccgcaccagaagatccatgttcgatgtattttgttggagaaaaaaagctaattttaatatcaaaaatatttctctttcgatagttgtatatatttatcgaacatcaacttttatattcatgtacatctatcaatatcattttttcgttttctgaattaaattgaccaatataaatgaattattattgtttctttttcctttttatcaacaattattattgtttctttttttctttttcaaaaccaggctttcccaaagtttgcggatcgccacgttttaaccactaacaccatattgatgttatttgttgtatgtgtataaaaaaagttatggcacagttaatgtgttgaccatgcttttcatatttgatacctagttgtgaatgtatcactgtgaagcatcaaaaagaagatgaaataatgcaccgtataaccaaggtgtgcactgtgcaatgcaatgcatcataaatttctcaaattctgttttttgtatgtaaattattgacgtataatggtaaatatgattaatagattcactcattgttcgacaataatcaaactgaatattgctcgataataactgaacatattacattaacaaattacgcactcacaatcgtcagaaccagccattattctcagctatacattctatatcatttgttatctttttataaccttaggtgatttaggtgatccaggtcacggtaagtatatatagattataaacttttatggaagactgatgactcaatctacaacattggagaaccacaactttttaatctatactttacgttctttaacatttaaatttcaaaactgagatggacttttttagttattatatatgttctaactaagtaatgacaccaattcaaagataatctagattatttagcgtgcttatataggcctttatttgcttggcgacagcgctgactgataaggttgtcagatagagaattacatgttaaatcaaatatgtgaacatacattacatacatatatatacgagtgatgagatcattatatatcacggattcacggagtgtgaaaaaaaaaaccaaatgaagctacgcagttgacagaaaacaaacgaaagatacacaaaaaatgttttttttttcataaaatcctcataattgcaaaacttaaaacatcaaaacgtatatatatcatcacaaattttcggcggaaacaaataataatggacaaaagtttcctaaattatagggtaatacaaaagggtacgtgggccattcgtagcatgtgcatgcatgtgcttctcctatctcctattgcccccaccattttccctctccttttgaaacaattaaaatggaccctttccttctcctttctctctcccttacctctctgtctctttccctctctctcgtcgaattcacgaattcgtgaggtgaccgcagatttgttcttagcaatctttgacgacactagaagtaaacaaattcttaaaaaggtatgtgttcatgtctcttctggttataataaggaaccctaaacggggaaaaaatccagtttggttatgatttgatgtatattagtatattacatacatgtatccctttgatgtataaagacatcatggtttattacttaggattaacttactttttcttgaaaaatgactcataattgagtatatttctacttgattaggatttaggatgcagcctacgagctcaatgaatgaagaattcctaaagaaatggcaaatgggtcttcaaatattccgtccttcgatagacaacacgagcgtccacgagagaaaaaaagcaataaagctctctgcagacgttgcaatggcgtctctaagaaaaggaacaacttgttggagccgagccctaatcgagaaaaccgccaccgaggacaatttcctcgtacgtcagatgctttccggcatcaaagcggaaacgttaatcaacaagaagttgcctaagaagactgtgtgtcataggaagatcgtgaggcgaagcaagaagatcttgaggaggaaatcgaaatcagcgagcgaagaggctgcagcaaaagctaagagactcgtcaagagacggactcaaggattaagaaacgttgtacctggtggtgagttgatgagcaatgacgtcttgttgcttcaagaaacgttagattacattgtgtcgcttcaaacgcaagtaaatgttatgagaagtattgttgatgctgccgaggccgaaattgagagataaatgataaaaaaaaatcttgttttatttttttatctgcggagattagttgcgaaagcatgatgtcgatcggatcttgttgttggtcattagaaccgtatgttattcggacaatgcaattgtcatacgaggatggagagatattatagtaagccattttgtacataaggaaatttatacaatgcttatagaaagtttctgctacgtgatggtggtttttattggaacatttcttggcaaatttttattttttttgaatttaatttagttaatgtgagtgaattttaagatatttttaacgcttcgattgcttttcttggcatgtttttatttgagagaaaaaaatagacaaatgttattttatattatagatatctggttcagttttattacaactcactcgtattggatagctcatttgacatgtcaacccaaaacaaatgatatatactagctcatgtgagttttttttctgtttttttttttcagattttcaatgttaattagctcatatgagttgtccaatatatatttgactctttgcttatgtttttttttgggttaaagacttggtttgaaaggatagtactagtctactagaacaaaacaaccaataagacagcacgtgtaaaaatcagtctttttcgtatatactccatgtttcatcaatcagcatcatttagtattcagctaaggaagaagacgcttaatggcaacgaggaaaaaaaaaacgtacatattcacgttcatttttttcctagctaaattaattaacaccgttcaaagatatattattttgtctcatgaaagctatgcctcccaccgatggtatttatccatttatatgtgcatctatgtacatatgattaatgattctcacttctcagttagatctgcattcatttttgtttgaacaaattcttattaaaaaaaaaatcttatttgccacgtactttatatgttagatcatgtaacaaaggggtattttcgattttttctgtatgtggtctaaactgcaagttctattgacaacaaccccaatggtttttctgtaacagctaacttgccaacattttctttggagattattagaaggaaaaaaacgaaaaaaaaataccaatataatattacacattttgagaaacttgtttatgttctgttaggcccagcccagtttgttattaattggactcgtaaatggtttgtttaataacagttggactcttgttaaccagtcaaatgtccacacaaactaaagggaaagaactcaagaagtgaatgaaagagagacaacacggcgttgccctttattttatcttaaaacgacatgtagtcttcccttattaatgtcttgactcttgagaaattgtgagtttgacttatgtgactttatttttggctgtagaattgtcgaggagcaaggaaattattaagtagaagcgacttataattttaaaggttagtcaaacattaggatttaggagaaagttgtctcaaactatttgtggaacttaaccctttttcaaaaaaaatcatttggggaactatctaagaattttaaagtcaaacagaaattgaatgttatagcttacaagaaatcatgtcatattctcatacatattaaaggagtgttacaaaaaaggtttattttcattttaaaatccaaactcttatgcaataatgcaaatgcaccatttatacatagaaataaacggctttgagtatacgataattctagcatatggtccaagctagaatcaagaatcactttcacaaaaaaattgtataccactataaccgatagagacaccctatgtggtaaaaatttcgtattatcttttagtgtatattttctttgatttttgacctattcctatagggatgaataaacttttggtcgcaaaattgggatgaattaactttgcacataaaccaatgttattaacgttataaaattacatgtaagttgtcacgcaataaagactaagtgactagtgggcatgtaatccaactgcttccatgcccgttattaattcacccattaatgcaaaactttagccattcaacatttaaatacatacatacatgtatacaacatatcgcacaagaatcaagatgtcactcttttgtcgtaagaagaattgcctcaattcaatgcaactgtcttaccaccacacctacttcttatctaatgctccagaaaacagaaattaaggaaaaaaaacatataaacaaagattcatagaataatggtttgtatctcaactgcaaattatatgattcattatcttattgttaaaaagaaaattcatattagacacaacaaattgtatgactaacagttccgctaaacatatgtagtattgatagccaactttagtctgaactttaacctaacaacatcaagttcaggattttaatttatctgaagaaatttgcgataactactcaccggttaagcatttttacggtttcttcaacaatctttagctttcacatgaccaaacaagaatcatgcggttttgaatctttgacaattttattccttgaacttacttattcatgatatttaattgagtcgttttcttgttagatggaaagcttcaatcgacaatttaattgttgggtctaatattcaagaactgaaaaagatttgtcaaaaataatacaagacgcaccaaatgttctcaatctatgtctaaaaatatatgtatctcaacaccacgtttctacaatgattcatatatctttttgcacttatgaggactaacacaaagaaacaattgaacagaaaactaaatttgaaaatggaaaaattatagtaactagacattagttgaagaagaagaatgaacaaccttgttttgtctccctgcaagccaaagcatagtcctcctagcaaaagatggtgttttagtctccaaagactccgagttttcgcacttttgattatcttcttcgcaaccactttcgatcatcgcatcgggatggttccgctggttcgataacctgaaagagaatgctcttcccgaagacgaagaaaccaatgaactatcctcttttccttgaactttactatgcttctccttcttcccccttagccatattttcgataccgaaaagctctctctttccactacattcttctcggccgcttcttccactatcctcatcgatccactcccactgaatttcaatctccctgttggatcaaacccgcattcggacatcgctgtcctatgaccgggcaagccacggttcttgcttgattgtttcttggttgaaacatgaaccttaagagtcgtttcttcatccattatatactcatatgatcccattgagaaacacctcctctcatctaaactactactattaccaatgttgttgttgctactagttccttcaccaatatctatattcctaaacttccctagcttaactgaaaaaggaacaacctttccaaccgaaccacccaattcaccatccaggtactgatctccgtgacccgaatctatcctggttgatccaagatcattgtttccgaccaaaccaagatgagcactagacacatcaatatcatcatttgcagccacacaagctgcactgtctctatctcctccaatctctctcgagctatgatcactcgcagactcgagcacaaggaggaaagaagaacgaggatcttggtgcgaagagagatcagagaggagactggatctacacaaaggacaagtagagtgagatagaagccaagtatcgatacaatccatgtgaaaggcgtggctgcatttaggtaagagcctgagcttatcctctgtttcgaactcacaaagacaaactgcacaatcaaaaggatagttcttgagaccgattatggatttgtaatggaaaacaggtaacgtgtcgatgaaggattggtcaactccagaatcatggagatgaaaaagctgttgaagctggccttgaagagcagtgacgttgtcgaagtaatcttctctgtctctgctcgatggtgtgaggaggaatctgactaagagatgaaggagaccggagatgaagaagatgattgagaggattatgattatgaggagaatacttggactgattttgctgtttagatcgaagtttgcgctggagcggagagataacggtggttcttgtggaagtgatgaaggagagaggaaattctgagttgttttgatttctgggaaaacccatttcatattttcccgagaaaatttcatgagtttgagagagaaaaggaaaaggaacaggaagactcaagctttgttgttgttggtttcagacatggaagctctcagaacagagagagaaagattgctctgtttttttaatttcaagatttggtatgaaagagatagagagagtgatgaataagagaattacaggttggaccattgatgatgacagaagagacattttcatttaagattcaacagttacaccaacaagggtttgcttcttgaatctgcaggttttacgaaaattttaatttatgtcaaaaatattaattggaaaaataaataaatttaatgggattggatctgattaaaaacctcaagagatgcaaagtcaatcaaagattagtttaaagttttaaacgaagaaacaaatcagataattagcgaaattaattaagtggttttatgtgaatagtatattgtgatctcaccaaatcctatgctccctcatttaaatcaacaagacaaagaacaccaccactacttcacaatccacaagattataaaatactaagtttatggataatatcgtatttattgtgcgtattaaaattgtattttcatagaataatagttcatcatttctctgcacacacaaattaaacagattagaaagataatgaaaatatcatgaaaagaacatggctcctaattttgagcgagacaaccaaatcccaaactattattttcatttcaagatgttttaattgtatttaatttatgcattcaatttcttttgtctttctttttgatatataaatattttattacattttttctgctttcgtgttatggtgttatttaattaggtagggttcaaataatacgagtggagcgggcagagaggaaattattatactaacaatttcaaatagaaaataaatgtaagttatgtagctgaatgaagaaatttcaaattttctgtcattaaatttggaacgaaccatcaacttctgtacttatttttatggtatacgaaaagaaagaaccaaattcagccttttttatttacgtcagccaaacgtattcagaagctacgcataaatagttttatagtacattagtgtatgtgaaatacaagattttacaaaacaaagcatttggaaattgaaagatgtggaacggaaacataggacaagaggacacgaaggcgagaagcagagcaaactctgtttatcgagatttggtgggcaccactttattaagtcaaaccagaagaaaacactcttccttttccttatttccattatttttattttataggttacacaaaaacctattttcacttgtttacacgaaactctcaaaagcctgttactaatagaacttagaagtctaagctagaaatatactatattggcattattttgggcagtggatcagcttttcattgtgctgatataggagagagatatatatctatatatataagggacgaaacaagatttgggaattatgagaaggttcgattgccttttctatgactcgaagcgaatcttgtgttatgcacttttgattaagtttattctacggtgaatgaatttaccggaaaaaaggtgtaggaaaaagtatatactcaaaagttatacttgatgcaatcacacattacattgatttctttaattattgtgttgttgataaaattttggtacgaagacgttgacataagccatttaaatcaaattatcattattcattttccgtcaacttatgtcaacatgaatcgatttaattatttcaatttaagaaaagccttatacacttttcggtatatcacatacggataatacctacatagtattgtactacatacggtatatctagccgttatttgttgtatcattattttcacgtattacaaattcattagaatatgcatattaattgataatcttggcttggcagaattggaattcgtctttatatatataaaaaacgtacggtaattcatatatgatctcataatttagacaaatctatagggacgtgacttaattttgaatttctcaatccatatattattaccctaaatctatttattccgtttttaatattttctttggagtttacaaagatacatataaatattagacattaaaagtttggtgctcgatgctttggctatagttagaaagtccactcacttttgtgtctttgacgtacatctccataacctataattttctacctagtcatttaaatatttcaaggtactttcataacttgaaggcggaaaacatgtaaaaaaggttaccttccagaagaaataatatatactatttattgaagaaataacatattcgctgtctatagattttagttttacatgttattttctttcgaaatcacctgctccctttgaccaattaaaccgagtgactaatataacaactatatgaaatgttgcagttacaaattagtttcgttaaaacaaattttgattagttttgtagaacatcaaaaaaatgattgtttggaaatatagataagactttttctaaataaatttggtactgggagtggcgtttttctaactaggcaggtttgcaaaatgcaacatgtttgactttagttattttgcaagcttttcttctttctcaaattaaatagagaaataaattagaattcgatgaatacaatcatcccgtaacgatgcaatttatctgtaaagacaaaatgttatattgatttaaaagatgttggcaagatagacccatgagccaaaagcataattgataaaaagtttgatcataaaactggtagagttcttatacaagattagacaaaaacacagattagttggttttgaattatacgttgatactcaatgtgaaaataatgaaaaacatcttagggttgggatcaatgggacaatgaacttttaagttagatctcccacgatcttgtaacaactaatttgtcagtacatgtttttttctttttttcttaactaataattccaacctaaaatttgaatctaagagattagtcaattgtttgaaatattctccattcgacaccttttctcacgaatcattattaaaacgtaacaatacaacacatttaggagatatataaaatgaaaaactggaccttataaagaggaaaaagaatcccccatgtgcatgtgctatacagataacatttattgctttgccaataaatttcagacccttgcttaactgtccatctaaataaaatctataaaatatcattagaatggcctcctcctaagcaaaaccatcccaaaaacttaatagccttcaaatgaagactgaaattgttagaactattagatacttaagaactacgaattgttaagaactactttgttaagaactacgaattgttagaactattagatacttaagacacatattcacctaggctatgttatgccttaagagatttccactaaaaatcacttaaatagtcctaacgactcatttaacaggttttatgcacaatttaaacaacatcgattttattgacaactgtgtatactcgtgctgcagtggtacgtagtcatctcaaaactgaagaaaatctataaatataaacattctctagtatctctgtagatcaactcattttggtgcgtttagactgacacaatagtcttaaacttctgtatgccgctcgaacaatatttatgttgtcatcatcaattcgacggtattaagaaactaaactaaacatattcaagcccgcgtatccagattggtgggcttgagagtgtagttttaaagcattttaacactcaacaaaattcgatggctttcaatttaacttcggcccatcgttagggagccccgttcactgaaagacaaacatgttatcacaatctctaattggtaggatcgaaacttcgaaagatttagcgatttttacaaacgccgcgttacgcgtttattacacaaacgcgaaaaaagcgtcaggaaagattggccccttgcgcactcttgcttttttctggaaacgtctctgaacgaccaactatagatcgtggaaaattcagattccattgcgacgaaaagaaggcggcggattcaaagaacacccaaatacaaatcgaagacggagccttttcagcaatttcgttttattcaacctctggaacaccaatcatctcaaactgattgaatgagaagccctcccccgtctctgctctccctcaccgtcaacgccgccgtcttaaacatctctcgcatcaacgatctctcccatcttcctgatcacatcgtccttgacctcttcgcggtaaaaccccttatctcaatacttggtttgattctggctctgggttttcgaatttagtgtaaagtttgaatttttaggtcatcatcatttgattttgagtgaaagttttaagctttagagaggttagggtttcagaatcgtagtatactactactctatatgctttgtgaggaacagttgtttgtgttattgatatctcttatctgttcttaaatcactgtttgttgttgttgtttttgttttttggctccattacatatgtattgatattgctgttcctaattgattctattgctgtttttgtaatgtaaagaggacattggaagctgggaaattgaatgagagagttctgagactctttatggcatctggaaacgaagaagttctttctgttatcgacgccctcaaaatcaaaatcaacgtttccccgatccttcctactcgtaagttttttagtgttactcttttccccttctgatctttacatgtcttcttgaagctaaaaagctatccttgtttctgcaggatgtgatgagaagtttagattgcacgggactagacgataggcgaaaggtgaatgattacgcgatgagcgagtttgaaaacttggtcctatgtgtttaaaggtcagttcctgattgcagtattcggatcatttaggtagaaaaaacaatgtgaacaactgcagagatacattaccagattgaagtctgtatttttcttctctttgtgtgtaaatatgaaacgaaggcggtcaaattatatataagcttcttctttcttccgttcttatgaagttttatgcaatcatagaagcttcttgtttgctgcagagttctgttataagtttctacttttgatagcgtggttatctgaattccaccaagtccatttttcctcttactatataaatatcgagtaatttggctcgagttagttcggtttctttcagggttggtttttcttggcagccgatgaattcttggattcatcgaagtagccatcaattagtaggggttcaggtttttgttgaattgtgcttagtagtttgggatatagtagtgaccatattgtcatttttagttgttacaaggctctgaagtctgaaccatattatatataggaagaattcatcaaggtgcgatgatatttctatcatttgttgagatcaaaccttcgatttatacattttggaataaccagagtcgcagtctcacgttttcatacctaatgatttagagtgttcactcaatctccaagttagagcaggctaatttcggcaaaactcttacctgcaaaccattatttggtatatgtgagtgtacataaattgtcaccggaattaaaccatcaaataacttgtcacaagcactttttctgcatatccgaattcgatgatgtgaagaaaatggttgtaccaattttcaattgcacatatgtctgtcattttcagattatgttacatgtaaaaaccaagtatggttattatattttgttttcaaaatgagaatcaaaataatagaaatcagtaagtatttcttatcatggtagtttactttgattggttatcttattctgtgtaagctctcgacgattttattcatattttgaaatactatacaaaagtcatgatgtgtgtacattttccattaggactttctagacttgagcattattttccttgatagcttcatcgacgtttaggccctgaaatccaaataaacaaactcataattaaaatcctgcttttctaaagtaacaaagaatattaagtgataaagattgggagaaataattacggaaaataatcaatgttaataatcccagcgacaggattagcgatctgagcaaaagcttctcgagaaagatcgagcgtagaagcacagccactgggacaatggtcaacgatcttgaccttcacggatttccccgtgcaagggtgaggcacggcgttacgaggtccgctgcatttcacggtgaacattttgccacaaactcgaccattgtcccataatgtatcactcgctgcagcgatcatcactccttcttgagtacctctgtaacatgctgatgctatcaaacatgaaataaaagaaaatgattttataacatttcgctgtaggttgatatgaaaatgtataagataagtttgttgtttgtatttgttttataattttggtagtaaaacacacaaaaattcttacgagtgtaacttgtgtaaaaagttgcaatcccgggagttgcatatgagaaagagaagagaaaaacaagaacggtagaaaaaaacacaatacttttactcatgattcgtatttatttgtaagagtgtttatctttgaaatgtgacatatctatttatatatctgctatatattatatgactaactctaaatatgcatgtattgtaattgtttgccattgaaatatctttgactgttcccattttttaacatgtgtatagttgtaaatttgttatatttaatttcttcttatctgtgttgactaaaggtttagaaagattgttatcctcatttgatagcaaatttacagccaaagactccagaaaacgtttactaactacgctgatcaaatttgccacgtaaatttatatgaacaatctcataaaaacaattcatcaaaaggaaaaaaactctccttttataggtcctaaatgtagtgaaatcaatatttatggactagtacatatggaacagttatgaggcgagcgttaatgggccgaacgagacgataagagacattattctaaaccaagctcaaccacgaagataaccggatcataaccgcaaaatgaaccggaataaaacgtgagaaacaacgagataatattaaaaatgatgcaaagaatttctgaatgtaaaggtaggtatggtgacataaggaatggagttaccgaggaagctgcccttgtcggattgtccttatcacttcccactcggcattaccagataggaagctcagaggacagagataataattggaacccaaaactgaaccctattttatataatctcatcaccaatactttatccttaaatgaagtctggtttcgccctttgttttctcctctagttttcttgtaacgccaaactacattctgtatgatcaaaatttagtaacataatttatcagaaccccattgttttaaaacgtgtctgtgtatttgtgtttatatacgcttaatcttcttctttctagttaaatttaatcaatttaatgaaaaatttggtatataaaaaaaaagactttgctcacgagttcctctcataagggccaaaactagttaaaaagttatcgtcaaaaactgatataaaaaagatgtccgaatattcccgcatataaatatctatcagacaaactcttttgtacaatatactttgaatccgataaattttcgatcttcaaaatccataaaaatctctcctttatttagccctaaaacagagtattagagtttgattcgtaaaagagaatatttttaatctccgccgcaagtcgatgtcgataacgattccctacgatggctcaatctcccgcgagccatcaccgtctccaccgccgccaaaagcgaacacgaagaatctaccgacgaagattctctctaacttcctcataggtctaatcatgatccctgtagctataaccgcttttatctttatcctcacgtctctcggtttcaccttcttcttcgctttctactggtttcttcaacgaaactatcgccaccgtctccgccgccatcgccgtcacgaatactcagatgggttatctccaagatgcgtgaagaggcttcctcaattcaagtattgtgagcctagttcagagtacggaggcgatgattgtgttgtttgtatcgatggatttagacaaggacagtggtgtcggaagctgcctcgatgtggacatgtgtttcaccgaaagtgtgtggacttgtggttgattaaagtctcgacttgtccgatttgtagggatagggtttatagatttgaagaaggaagaagatggagaccacaaggtgaaattttttgatcggtggttttataattagatttgaaagtgtgtttagtttgttatcatatttagcagcaattttggttttcatcaatagtcatgtacagtgtcttttttttttttttacacggcttcacaattgaaagcttgtttcttcaccgtttgatgaatttgatccaataagagaatgatgggtttctgtagaatttaacttagtttgaggtttgattatcatgccaattattaaattcaatctagtcaattactgatagaaatgttgtccatttgtcactttaaacatgttgcttatgttaccttaatgatttctcataatttcacttgagattcagtggttaatcatcaatgtttctgtttcaatttgtccatgatgaagtataagttctaagtaaagcttggttcatgtgattttaatttacctacttcacctccaaagttatgtcaactatgttttcaagtgtgtgattcaaaagtttatattgaacataaaaataaaggaggctaaagaatcgttttctgattggaatgtgagattgtgactcacacggagaaagtgattgtgattggatctgactataagactaaagaagtgtttttgtgaagtaacaagtaacattgtctaattagtgttttgtattgtaaactaataatgactttgattaacgaaataatgtcactttagtcaaatgtgttgactttcttgtcttataccgatggctcaagtattcccaagaaaaaaaaacaaatatccctccgatttctgactcgtcccgtgactcagtgattctcctcttccaatcctctccggaagaactaaacaaaaacacgatctttctcagatttagagagagtaagagtgagagagtgtcagagacacgaatcaaagaaatgatttttaaaagcttctgttaattctaatttgcatagatttgtttactcgagcttgagcttgagcttcttctaatggagttaaggaaggacaagcttcttatgtaagttttctttctctcatccgtcggttagacttacgttcctgaaagtcttcaactttgattgcccagaaattaaaaattctagactttgctttagatttatctcttctttagatgttacaagctcaagctccgattttgggtactgggtttaacttaaatctctagttaggtttcagattacagatttgagttgtgtattgctttgtaggttttactcagaggggaaagaaagcaaagaagctaaatgggcagtgaatgatccaatgagcaaatcttataagctctctttaccttcagcactaagacctgataatctcttacctggaaatagacttagatacactgatgcttctaagtccaaatcttctaaagtctcatggtacaagactattcttgatccaggaagtgagattgtcttgaaatggaattgggtcttcattgtctcatgtatggttgctctcttcatcgacccgttgtacttctttgtcccagctataggaggagataaaaactatccttgtgcaaggactgatacaagtttaagcatccttgttactttcttcaggacaatagcggatcttttctacttgctgcacattttcattaagtttaggactggtttcattgcgcctaattcaagtactagagtgtttggtagaggtgagcttgtgatggatcctaaggctattgcttggaggtatattaaatctgacttcatcatcgatctcattgcgacgttaccacttccacagatagttatctggtttgttatatcgactacaaaaagttaccggtttgatcataacaacaatgctattgctttgattgtgctcctccaatacatcccaagattctatttgataattccgttaagttctcaaattgttaaagcaactggagttgttacaaagactgcttgggctggagctgcttataatcttttgctatacatgctggctagtcatgtatgaatcccattccttcttcttccattatttcattccttaaatgtgatgataatcaaagctacaatgtttttgttgggacaggtgcttggtgcagcctggtatatattatcggttgatagatatacatcgtgctggaaatcaagatgcaatggtgaagctggccaagttaattgtcagctatattacttagactgtgattcaatgtatgacaataatcagatgacttgggcaaatgtcacaaaagtgtttaaactctgtgatgcacggaatggcgagttcaagtatgggatctttgggaatgcaatcacgaaaaacgttgtgtcttcacagttcttcgagagatatttctactgtttgtggtggggattgcagcagcttaggtaatggcagagatcatagaaattttttgataccaattattactctccttttgattacaagttttagaatctgatgacattttcctgttattgtcatattctagttcttatggacagaatttgtccacgaccatgttcatgggcgaaaccacatttgctgttctcattgcaatctttggtcttgtcctctttgcccatctcattgggaatatgcaggtatggattcctgcgttaggataagttctaaaagtatctgcttttgttcttatgtttcttgggttttgccttttgtttgttagacatatctgcaatctttgactgtacggcttgaggaatggagattgaagaagagagacactgaggagtggatgagacatcgtcaacttcctgaagagttgagaaaccgtgtgaggcgatatgagcagtataagtggcttgcaacaagaggagtcgatgaagaggttctcctgcaaagtttacccactgatcttcgccgtgatattcaacgtcacctatgtttagatcttgttcgaagagtaagtttttctattgatttgtttatcctacaaatggttcaacttttaggttaactactatcttgaatcatgcaggtcccatttttctctcaaatggatgatcagctgcttgatgcgatatgtgagcgcctggtttcttctctgtgtactgaagggacttaccttgtacgtgaaggtgacttgatctcagagatgctcttcatcatcagaggtagactcgagagttccacaaccaatggaggcagaaccggtttcttcaactcgattatacttagacctggagatttctgtggggaagagcttctttcttgggctttgcttccaaaatcaaccttgaatttaccatcttctacaagaacagttagggctttagttgaagtcgaagcattcgctcttcgagctgaagatttgaaatttgttgcaaatcagtttaggcggttacacagcaagaagcttcaacatacattcagattctactctcaccattggagaacttgggctgcttgcttcatacaagcggcttggcgcaggtacaagagaagagttatggagaataacctcactgcgattgaatcaatggaaaatgaagaaggagaagtaggagaagaattagtagtagtagaagaagaagagtgtgttgaggagagtcctagaacaaagatgaaccttggagttatggttttggcatcgcgttttgcagctaatacaagacgcggtgttgcagctcagagagttaaggatgtagaattaccccggtttaagaaacccgaggagcctgatttctctgctgagcatgatgattgactgatgtataaccaggagaagaagctgactttgttccatagaagatcttaatgacaagaacactacagagtaagtttcctgttcctttgggagacataaagaaagaaactcaaggcgggttttggtttgtacacttaaacatcttttgtaatataagcttggagaattagttttgttgtactattaaagaactcgtttctaaattctctaaatgtaaagatgaggaagttgaagtggattatgtacaaatcacatcaaaccttgcaaaattgattgaaccaacaaggaagtaaaaagatgtctaagcccattcgtcaaagcccctatatgccgtggttactgacttactgtaacgttgagaataagatggtaaagaaagaaaaaatatattttcttgagcatgttgcatattgctatcgacacaagcttctttttaaagaaaggtagactcacttaatcaatagacataagatcatactaatgatgagtttggactttggtccatgggaaaaagttaaaatgtttacttgctttctctactgacctagatatgtcggatcaaatcataatctacattacaggattacatacatatttgggatttttctttttgcaatatggccacaagaccagctcaatgtaatcatggattcttagtcgatttaaaaagttgtaaatattttaaactaacatattgaaaagtttctgaaaatttcttgtcccatataatatacaaataaattttatggtcttgaatgacaataacaatatagtatggcacaagaagttagattgaacggaaactgaatcatgaaaacaatggttttcaacaatcataattatagtaacatatattaatattttgaatcgtttattaatatgtgaaatttttaaacatgcatgcatatattaagagatgacatagtagttgtaccttatagtgtgtagttgctcactagagaagttaagttcatgtcccctttccaaaaagctcaaattcaacattaggtttcaatcatgtaaggttgagatccgcgaccccttttagttataacataatttaatacatacttatattcgtaaatcattatcttcacatccttttcatgcctataattacaataattaaaagagaaaaggctagaatatatattaaacaggaaataggtctttgagtaaagttgcagcatttgctacattattttattttccacttgaagactattcaattacactctcacattgatgatattatgagtttctttttgtcacttcaagatcaagtattggcatggtgtatgatgaatctttctgtgagataaattgaatctaatttaatatttaagaattttcaactactatagtgtccaatagcttaatctttctcacttttgacaggatatatttaagtaagaaaaaatatttaactaagtgaggaggcataatgcaaatccaccaaaaagatagaaagagagagaccataaggtccatttatataactaaataattgaatgatataaaggcatgttttggtttgtcttctccttgttctagtgcttctctttggcaaaaatcctttatttcaaaataatattaaactatatccccttaataatttgttgtcaataattaggttatcagttgctttatttcaaacaaatccgtattttttaatacttgaaaagaattggagatgcttttagttatgtataaacaaagtaccacaaaacttcagccttatcttccactcatagaatattactaatagtatgtaatatctaaaaaggcgaaggaagtaaaaggcagttttggaggctttgtcttcaagtgtctagcagagaaccggagttatacgacctgtaaaagccaaaaataaaacacgactattgcatcaacttgtttcagtaattcaaaatatatatcaaaaaaaaaattgtatacttaataagtcgtctagaagactttcaaacaaataaagacatgtacttaaaatctcgaaattatttactgtgtcgaaaattgtctttcatcaattagatttagatgtactatgcagccactacaatattgaaaatttcattaaaaacatatatatatatatatatatatatacgtaggcatatggaccatgtgaattcactaggcatgcatgtagttgttaagtggtagatttagatattaatgtccaatgcatatgaatccacttatatatatgaaagagaatgtgaatactcctatcatattagctattaaagaaactcgctacactgaaaaagggtaaaaaataattcgtgatgacatatgattaacttgaagatgtaccgatcgaatcaatgtaatttaaattcgatctagcagtctaaattgaacttgaaaagccatggcgtcatgtatagtatagatcactagaccaaatgtcgtagtcgtttattgttatcatacgtttagttaggtttaaatttattatcggtagttgaccgatttgtaggttgaagctttgaaacaatggtcatcataaatgataaattcaaagtatgaccccaagagcacaaaaggagtgatcactacgtgtggtccgatcgctttacattttgaattttgaaacatgttttggtcaaaccggtttggtggttttcaactttgttttgatctcccatttctctaaatcgcgtattgaccaaattgacactcaaagacgactaatttccagtgaaattaaaaccccaaatatcaagatgttattcaagatcctaatatgaagtctatgaattatatcaaaaaggttgactttaaaatctagatgcttcaaatccgataacactggacaaaacaaaattggtagatatagatggcgtagatcaatttaaaacgtgactaaatgtgcatgtcattatttttctggtgtgttgatttctattaaaaaaagagagcagagattatacaataaataaaacctaaaattctaaaaactatggtggtttagagaatacaagctgttgagtgttgacccaaaaacgaaagaatatgagctatggtggtttagagaatacaagctatgagatgataattagctttcatgtttaaaattttataactatagtctataagaccacaccatgtccaaatttgttgtgtataaatatatagatatactaataaagtgattagaaacatcatacatagtggaacagctccaccggaactatacaaaattacgaaaaaaacacatgcacgaggttccttgaattggctatcaagtaagtacatgtatcaaacaacctttttgttaaaaacattcaccatcaatcttcatagtattagtaacactaatcactactttgatttagcacgaataattccctttactccagcttctttcgaatgaatttaaaccgttagctaaaaaaactcgaataaaagatgacatataaatgtataaaaaaagcaatgaggtattattagtctgatattgtcgaatgatttatttaatatatatttggtccattgtagtggttggatttgctgctttcattctaaaaaggtgaaataaagacaaaccacatactagccgaacccacctaatatttaaaaagtacaaactttctactgaaattaatgtctcctgaatattacaaaacttattatatagttttcatgaaaattcgatctgctaagagactataatatattccacaaaattccaagaagaaacatacgaaagaataatcaaatgtaaccttgaatatataaaaatatccactatgtccccaattaaaaatctttattttggattaacttttttgctcttatttttcaacattttaatatcatgagattccttcattttcttttgtagtagtatctaactttctactttcatatataagcttgggatgtattctcagccgttggttttaataataagctttctttttttaactgtttaaatgttttaccgaacttttttccaccccgccaaaaagacggttcggagacatcattatatttacatctttaccctcaccaattatcttaattacgaatctacccctcaccgggaaaaaaaaaagaacaagaaaaaacaactcaaacgaccaccgtcctgatactactcggaagataccctccggagattcgatcattcagatcatcttcaagctcgatcctaatcacagaatcttccgaagacgaaactcgagatttcacgctattcaagctcgaacccattgcttcctcaagccattcctctaagctaatcttacttagccagatcgcacctgcaattctctccaaagcatcatcttcaatctccaccgttagtccatccgcgagaccatttgagaaacgtttctttaacgattcagcagttttgctcttgatcgaatcaaaatcaaccggtctaaagagtatagcatcgtctactaaacccactagcttatgaacgaggttgccattatcttcttgatcatgctcgactgttacatcactcgatgaatcaaattcagctgcttcgttcaaatcaaaacatatctctttcctctgttttgtttggtcattgtcgctataaagccaattcggttttctttttcgggttttgctgctgttgcaaacagagagtcttaactcccatcctttgttcaccagagactctagtctcgtttcatcgatagaagcaacgtttttcgctgaaccgagcgatgaatttgcggtaaggataataatgacgttccctagactaacctcacgcccatacgaatcgcagattctccctcgttcaatcgctatcttcacgttgttacgcagcaatatatccgcttcatcgatatcttccaaaacaataaccgcgaaaggatttctcctaaccgcttccgcgaatctatccaacgctgttttaccacggatgtttaaaccatcatccatcctagaactagaaccaagactgatggttatcggttggctacccgaaacaagatccgataacgcagacgccattttgctcttcccagctctgtctggacctgtgaacatcaaccatatatcacccttcgatttcccattaccatgtttgcattctgtaatcgctgctgctaccgaagacgctgcatcgtgctgccaccaaacgcttttcgctaatccctttagtagcttcttgaataaatcgatatcgaatgaatctcctagctttccaaaacgcgcttctctggtcttcttctcaggtgaggataaacctctgtttggccgtccaagaaccaaatctgtcccgaccggactccccggtggagttatatccgatcttgtgtttattttcatcatagacagcgtagaaggagctattctttcagacacagactgattcggatgtaaacgcaaacataagtcgttccatttcttctgcaactccacaatctgttgatctttcgtctacataaaacaaaaaataatcaattctcactttctcttttcataatatctcttggaaactaatttgtcaaatcacttaccagtttcttgtcaccatcatcattagctttagcgttctgcaaccactgtggcaaaaccgaccggttatctccggttaaatctttttccaccttagctacgtcgttttcataactctgcaaacaccgagagcaacagctcattttactcatcggaatctgaaagcttctcgtcggagatatcgattcaatggaaatgatgttgttgcttaataacatagcgttgttattgttattgctcccaagcctaatcaaaacaaaaacatctaataaatcagaaaaattgaaacttttgtcaagaaaatcaaaactttcaatttgaataaagaacaaaccttgggaatatcgccggaagagaagatttggcggcgatcggaatagcttgaagatcccaatcattctccattgatggataataaacttgacatcgaagataagtctcacaagtagctgtaccaatgaaacataaccttcctttatatctctccagaagcttcctcatctccaccacagctccaccgtttgccgccggatgttccactaaccatttcaaatctccgagatcaagaacaacgcctccaccaccgatccgagtctccaccaaaccggagatttcaccaagcctcgtcgccaattgtgaaactaactctttctccaaacgaatcacctgaaaattacgaagcgctccatcggagaattcgccgttctcgatcttctctagaatctctttcaccagaatatgaggctctgaatcgccgacgagaaccgggttacgtttccgggttcggatcataatctcaatgacccgttttgcttcatctgtcctctgtatcatcatcccactttgcataccaacgccgggttgttgtaaccggggattaagataaagattccggttaaccggtgccggtacggaacgataaccgaacccaattgcagacgggttaataattccgggtgagccggtttgtctcgaattagaaacagagttaccaatcaacgactgttcgatcgctgacttcacggcggggctagagaagctagcttcacgcatgacccgactcacactcgggtcatcaagaatcgatataataagctgttcaagctcaactttcacagccaaaagcggttgttgctgttgctcaggacatccacgtcgttgatgagcttgagcacgttttaaagccgcggtcaaagcgtttgaaagtagcggttcttgcgtttgcgacggagaagaagaagaagacgacgaagtagtggttgttgttgtactagttgtagggagacgttcgagagcgacgctgaaacagagctcgagagctcgacactgaagtgggtgagaagagtttggatgagatttgatacaagcttgtcggagataaccagaggaagaagataagagagtagctgccacgtgtaacggtgtcgtgtggccatggttacgacgtgtggcttcagcaatcgactggtttaaaaccgtcgctgcttccggcgtcagcgtttgctgtatagtaatcaaatctgctctcatctcaaaaaaacttttctcaacaagaagtttttttttttggttgtggtttcttcaccttttgtttatcttataaagaagaaacctttgcataaagaacttttaggaccggccacaagatatttaaaagggtcacgaaaaaatgcagaggagaaaagttgtttaatcaggtaaaaaaaaagaaaggatcaaacacaaaagatggctttttacagaaaaacaaaaagccgatcaaacagaaaggtaaaaaatcgaagcttttgtttgaattgtctttctctttctctgtgtttctgtggtttttgcagtgtgtgtgtaagcgcgtgggaaaagaaagaaaatttgaggagaagaaaaggaaagattggatcatttgccttcacaagaacttataaactctctcattattatagctttctatgtgtatctatttgaatttattcgacgccaaatattataaggagcattgaggagattacgatagtgtccttttgtgtctgcggctatagagaatagtaaccatgcattgagcctcaaagtcattaacttggttttgaaaattgcttaatttcttcatttctagaccaattaacatctacttaagtattgagacccaattattaagattaaattatttgtgaattgtgatgacagagaattaaaactcgaaataggtactaaatgaataccgatataggtcttaaaacggcgaatacgatgctctgttttcagtgtcatctttcgtattttagaagagatattagtgttactatttaaataatcatcaagactacaacaagttcatgcacaagattggaagaagatttattaacgtttttttgtaagttgctgctatacggttgagaacaaactttatatggaaaagattagaaatttgatattgatgtttactactactaattaaaacgtttggaaaaaagcaaaaaattaaattactaagtttagatgaatgtggggaaaaaaagaaaaaggtagcaactaataaagttttgatgacgaaattaaagtttgaatctagtcatagtaatgagacaaaagtgttcacgcgttttaaagtggcgcgtgtacgataattgcttgagtgccttttctgactcgtgatcagcttaggtggtgatcggtgtatgtcacgcgctattgaaaacgtgtgagtttttttgtattcgttgggttttttgttttgttttaaaaaaacgaaatatctgtaaatcacacgcaatccctgcaaaaggaatcgactcaaaaagctttttcaccttttcgtattttgcctttttatctctctgctgtctcttttacgccgatccaaaagctcttttatttttattttgtagttagcattttggaaatcaattgtaacatagaacttcactttgaagtaaatgaaaaggttgaacatataaattctacgagtttgatctttctgactcgaaggtacgagaattacttcaaactgttatagcttatgtgtgtttaatgtatcatcgatcatgtgccagtcttgcttttagatttggaactgaaatacaatccaaagtgtcacaatcattttgaaaataacgttttaacttttctattagaagaaccggaaacaaattgaaaagaacgtaacataagtgttacgaattcatttccttgatacaaagatcataattttgattaaatgtctttccatcgaagcaagataaacgctaaacttgaattataacaaatcaaaatagccaatggctgcacgacaacttgacatccttttggaacaaggaaagaaattacaaaacattgacgatcgattttgttaccaacttcacttgtatcattatttggataaagaatattaaatgcagagacaagaatggtaaggtcatcacatgtgccgatgtgcgagccgacccaataaattcagagaccatttaatagacaatctttttgtgctacatgactcttacttcttctacaccaaacaaattgtccttatttcatttgttacctctcatcattgcaatatgtctacgaaaaacttaatactgtactttacgtgagattcaatttttcagaaccaataatgctatggagtatcgactatacatactttcatgtttcatactacaaactacatgaataaatttataagcaacgaaagtaaagaggtgatcaagtattcattaattttattagtatccagaggattccggattagagtacaaattaatctctatagtatgttgaagagctctcatggtttaaaattctaggttttgtgagacatttgtaatttagaagaaatgtgagtacagtaaccatgcactcactacaattattatccaaaactaattgtggacaacttcaaaactcgtccaagtagtcgaatcatatttactttattcatgtgatttaccatcgtcatgagatattgtagtcgttataaatataaatgagataactagttttaaaaatgccgtaatcatttctaagagaaagaaaaaaaaaagtttaaaaggtaaaataattggggaaagagtaacgcacgctttgcctttagggttacgcgtttatcgagttcactcactttttaaccaactcctttgcagccttttttacaccaaacttttctctgttatactcttctcttgtccaattccacacctcttctttctactttcgaatatacagtttcatttaattattaaatagtactaccatagtcatgatttagaaaaatacttaatcatcttgcagttcaaaaataatactaaatgtttgcactaacattatcacttaccttagacgagtcatttagctttgtaatttacatttgtcgaattagatgaaatttgtagcaccagttacttattttattttatggtgtctctgataaactttacatgtgtatatatccaatcatatacaaacatttgaaaacaactagtatatgaatgagagttcttctgattgtgttctccaaacgcttggtttggttatatcataatatccaataaaagaacattcatcctcaagaagccaaaattgctctaaccaatagatgtccaatctttgatcaagatcatgccaaataactcactcttgctttgaagagtgaacgcatctgtgacttggaacttattgttattaaaatcccacacattaatttttcttttatgtacatgagacagtatataagattaactcaactaacctcgctaggttagcataaatgaatgaggaatttacgaataaccgtcatcttcgtattcagatttggactatattcgattgacctattgttttacattgcaaaccgaataatatgtacatgtgatcgggtctttgggttctcggatccaaaataatggtctccgagaaaatggaaattgtcgtgtagctagagaaaggtgaaaaatagaaaaaagctgacgcaaagaagagaatagttttattgtgaagaccgataaacaaaaaaaagtgctggtttaaaaagatgttaaagagtttcagctttctgcatttattataacttcacgtacaactcttgtcgaccttctgtgtcttttaatgcctatcatttctatttaccattttgccctatatttctgtcttttgataagcagaaagtgagcaaaaaattttgtaatatttgaaaataattgaataaataaacagagtataattttcttttcttttgacagcaatactaaaatattttatagtgcttacatattagtaaataatataatactcagatgtttatgtataagttttcaatctataaatttgttccgaatataacataaattttcatttcattttataaacagaaattaaaagtttgtcctagttaactatcttatgccatagaattttgtgaacataattagagtgagacaaaccgtaaaactgatcactccaaaccgtttcaaataactaaaagcataattaaaaccaatagttttttttcatattcaaattaagtgttggtgttttactaactaatcattaagaaaatggtagtgtagaaaaaaaaacagctaagtacttttaaagtcatcaaaaagaaacttgagttttttaaacttcgcaaaacattctgtagacgactttgtaatattttgctaacaaaacagctaacattttttttctaagtttattaaatctgttgaatgtttgagtcattttcttttcttttaccataatattgtaggccaataaaagatgagaggtaccgactagttgtgcaatcaatgcattcatcatgaaaaagttgaattctctttgacgcgttagggactccccgaaaaggtctaccttttccattttaaaggagcacaaattttttaatgcgatttctaatttcataaggtatatgatcatgtgaagatgaaaaaagccttcctcaaaggctacttattaatttgtgcagagagactatcatatgtatagattagatagcacaatttagttcttccaaagtcatcaaaaataaacttatgtaagttgacgtaaataatacaacgatgatcatatttcaatatttcatataaaagggcctctcgctgtggaaaaatatttgatgcttcaatgatcagaggcaaatcaaaatctgtaatgaaggatttattataaaactaaaactataatttgtcattaagctacaaaacccattcttaaatctcaactaaacccattaagttcattattggtagggccgaatcacattgatggctcgcttttctttcttatgataaatacaaattcttaggtgtactttgagtgattcaagtgtcacatgatgccacacttatttctttcaaaacatccttaattacaaacaattttattttatgatcaataaattttaatgatattcagtcacaataatctttgaaattacatatattcaaacttggttatatgcatccatgcataattgaatattagtatcatttgagttcacgactttaataccatcacttccaaacagagcggcccaactcgaatccataaaccaacacacacaaaatagacacaaattgagtctatggattaaatgtcaacactgatccactatagtctatatttttataatttttatggaagagtttagtcgaacttcagtgcgaaagaaagaaggctaagcaaccttaacaactcacttaagatttagccgtgaaactaaaatttggctaagcctcaaacctgaattacccttgtttgggttcatatgccgactcattacgtcccaccgctacttccaaaggcacgagtccatgtgggtcataaaatgacgtgtacttgtttttttcttacagagatgaagaacttaactgatttgattccgttcagaaacaacggattgaaaacatgttgattccgattcgtataatgtctagattccttttctttaactcgtaaatcctttcttggacgcggtttcgagactttgacgttgataaaatgtgaatatgtgtacatgtccacctttgcctcttacgttgacggtcgacaactttttgcaagtcttccaatttctttccatttatgcaatttttcccctcaacctatttatatcttcactatatgctaatctactcattttaaatacttttcattaaagatcaaatttaagattaatctgaaaggtaccaaattttatttatgattggaaaacgatgcctaaccaataacaaaaatgactttcattagcattttgatttattaaaatcctgaaaataattaagttggtcctagacacaaaactaaaatatatcattccaccaacatcatcatcatataatagaagtttataaatgttttatttgaattttagttcaagttacttggttttagaaaatgcgtaaccaatataaagacggctatagtatgaagcgatgttgatgcggaattgatctttagttaaacagctcttaacttttacaagaatttaagttatatctcaattaaaatttggtttcgacaacccctgaatcgtttgtttgttgtggaacgaaaggtttgtgtgaattgctttaggcaggttacagaggaattaacatataattcaggttttttttatctatttaaacagttgaacagttttaagttttaaccatacatgaatatatttttatcttgattattcagttacatttggattgaatagagtcggttaatccaaattagtcaccttttcataagattgtttatattgaagaactaactaacgtatgagaatcaatgtttagacagacttgagagcatttgtgaaaaatttaggtcccctgtatacccataaaacccataggctataatgggcttaaaaatacaagataattgttgtatggatcctaaaattcaccacctcggcccatacgtgagttatgtaaatgaaagttgaaataaaatagttatgtaacgcaccggttatttaggatgcaataaatatataggcatatctccctaaccagaaaagaaaaatgaatattggacagcttcacgatctaataacacaccacacccagtagggcaatatagtcataaatatgcggcccatatgtcacatcctgacacagtccactgcctcatttaattgtcccttttaccctttttacaatcttaacgtgacaagtaaagcatttaatagtctctctttctgtaaacttacatagttttgcatttacaagtcaaatatcaaaatatgcaggtattattaggggttttaattagggtaacaagtaaaaaaaactttaaatttgtagtcttacgatagaaaaaaaacttccttctcattcgccttaaaagatggtcacatataaatcaacgagatttaaaagtagtggcaattctgtaaattcgtaatactagtaagggcattttcatgtcgtttttttaaaaagttgcaaaatctacacgtttaaatacgcacatcgaagtacaccgattttgatttgctctgtcttcgaaaactaatcttaaaaaacaaaacacagaactgtcaatttattagtcttattgaattgtcttcaaagttcgatcatttttttacgttttattttaatttgtttctccaagaatctgataatggaggagacgccgagatcagtcggcgaagcatcgacgactaatttcgtggcggcgagaccgtcggcgaagaccgatgatgcagtgacgatgagaggttgtggttttgctaatcttgccttggttggtatagacaaagaagagcttcgagggagactagcgatgcctgagtatcttcgtatagctatgagagattgtatcaagaggaaagattcaacagagatttctgatcatttgttacttcctggaggcgccgccgctgatatggctcctcacgcgccaatggttgtgtttattaacccgaaaagtggtggtcgtcatggtcctgttcttaaagagaggcttcaacaattgatgactgaagaacaggtctgttttttaaaaaacaaaaactttttttttgtttgcaacttatgaaatgagctcactttacttaacttttgaaatgaacttgagatcatatttttgtttgaagaagattttaaatcttgatttgggagtttactttctttttgacttcactagatttgtggttagattgtgaatggaaacactctgttttggtttaatgagtataactatgagcctatggcattcttattgttctgacatcatcaaatgttctgttttttttttctctgtaattttgtttagaagaagttataaactgttttgtcttaaaaagactgtgattcctccttagttagtgagctcatgttaatatttgcaatgacaggtatttgatctcacagaagtgaagcctcatgaatttgtacggtacggtttggggtgcttggacacattggctgctaaaggagatgaatgtgcaagagaatgcagagaaaagatacggatcatggtgagtatctatttccaaagtattagttagcaattggaattagatttgctaagttagcggcgatgattgatgataggtagcaggcggtgatggtaccgttggttgggttcttggatgtctcggtgagcttcataaagatggtaaatcacatattcctcctgttggagttatacctcttggtacaggaaatgacctctccaggagttttagttggggtggttcattcccttttgcttggagatctgctatgaaaagaacattacatcgagcaactttaggttccattgctcgattagatagctggaagattgtagtgtcgatgccatctggagaagtcgttgatcctccttattctttgaagcctacaatagaggaaactgcacttgatcaggctttggatgctgatggagatgtacctcctaaagcaaagtcttatgaaggagtgttctacaactacttcagcataggtttggaatttggatacatgaagtaactttatctttcattgttcttaataaatttctacaaagttaaaccttttgaagtaatttggtattttcttgtgttgtttaggtatggatgctcaagttgcatatgggttccaccatcttcgcaatgagaaaccgtatctagctcaaggccctgttacaaataaggttgctatatatcagaatcttcattcttgtctaagtttcattaattagctgtttttttggtttgtaatgagattatgaatcacactcgtttcggttttgcagattatctattcgagttacagttgtactcaaggttggttttgcacgccttgtgtcaacaatccagctttaaggttagcattttctgtgaagagagtaaaccaaaagccttttctttactcaattcctgtctcttgttgtgttgacatgttgtggtaagatgaatttgcaggggactaagaaacattatgaaaatccatattaaaaaggcaaattgttccgagtgggaagagatccatgttcctaagaggttcatataaaactaatcttatctttgattaaaactaaaaaaatggcttcacttataatctctctggttttgttttggtgtagcgtaagatctattgtggtgttgaatctttataactatggaagtggaagacatccatggggtaatctcagaccaaaatatttagagaaggtaataatgttttattcagtacactaatcttaggttttattgctttctctacaagctttaacagaacgtgttcgggttttataacagagaggatttgtggaggcgcattgtgatgacggactgatagagatcttcggtttaaagcaaggttggcatgcgtcatttgtaatggctgaaattatctcagctaagcacattgctcaggtacaacaaaatacatccaaagtttctttataagaatcggtttaacctcggtttgatattaaaccgtttatcgttttaggcggctgcgattagatttgaactaagaggaggtgattggaaaaatgcattcttgcaaatggatggtgaaccatggaaacaaccgatgaagagtgattattcgacttttgtagagataaaaaaggttccttttcaatcgttaatgatcaatggcgaatgatcgaggaaactcttttcaagaagttgtaaaaggattaaaaaagcatgattctttatgtatttctgttccatcaattagtcaaaatagtgatctatgttgagcttttgctacggctgttgttgtgctagtgaagcatttaactttgtgtattttatcaaaaaaagatggttatttattcaatagtcattaatatacaattaagatataagcaatcatcttcaggtagaccttgaaatcttgtaaacatgattttgctgtctttaaactctgtttcttaagtcgtttttcagtgttttggagatagtagtaatgggtctaaaaagttaaataatgtttttgtggggagaaaaatgaaaatagcagattttcgaggatgggaagagtaaaacatatatttgagaagtcgaaaagtgtgaaatatttgttctgtctcgcgaggaagagagaaaaatcgaattagaaattgcaagttttagggttttagaaaatctatcttcttcactgagttttccagctccgaagaacacttgcaacttcaggcaattatggcgagcaccaaagttcagaggattatgactcaacccattgtacattcctcgatttctgtttactaattcgatctttttttttttttattgtttctgtttagctcactgttcttcttacttttgatttcagaatctgattttcagatttctccaaagtgtaagtttttcgattactctgttaattttcgtcacttttactctatttgggaacaccattgagtttgtgagaggtgtgtacttatatatatagtgtggttcttcttataatgtagaaagctcggattcagatttggctttttgagcagaaagatttgaggattgagggacgaattactgtaagtcataatcctgtttcgagcttagcacaaaattttgaactttcttgctttgttgataggttaaactagaaaatttgacatgcttgtgttagttaagctgtgtgattctagctacacttttaaagtgaagtgtaacatcttggaatttttcataatgctgtttctatttgttgttcgaattttgattgctacgctgatttagttaccgttgagtttatatacattgtttgatagtaagggaccaattgatagcaatgagttcggttatttcggttggtgcgtattatctagatttaagactgagattgtattgctagaatttctttcttgagataataacagagtttgttcttttctgtgaagcttaagatttatcaatgtcttggttgtcttagatctttaaccacgagttgtttagttgacgttgagtgtttcattgtttcgttattttaacatttgcattgtgcagggttttgatgagtacatgaatttggtgctggatgaggcagaggaagtgagcatcaagaagaaaaccagaaaaccacttggtgagttacttgctactctcctacaagactcctttcacatttcttatattggttttgtttttggtgctaactctcgcaaatactggattttcaggtcggattttgcttaaaggagacaacataactctcatgatgaacgcgtaagtatcattattatcctcttcagatcctttctttcccatatctctcaattcgtctctccatgaatgttgagatacaaactcaatcccttatatatcttattacaggggcaagtgatgtctgttgcagtgcaaggaatgatctaattatatggaatggtttaagagttcctgctcccctctcgtttctctgttgggtaaaagttgtctttttgctgtttacttctgtcaacttgagaaatttcaactttgcaaacaaaattatgagaaaatagtttcatcaaaaaagacctcaaatccaagaagattgtagaaatgtctaatatttgtctatttggttagattacgatccaaaatctgatattaatatgattcgttggtcttattagtcaaaagaaggccctcgcataaatcacacataagaaaatgttgggagaaacatacgttgtgttgttttcccgatctcacgttaccaataaaaaataacattgtatacaaaaagagaaaaagttaaaacgtaagaacaacctcttttagcatgagtttttttagatatacaaataaaatcatactcaataaggcttcctaccaagaaaattccccggtggatcataattgcaagtcaagaatacgcctcctccgccattgcagatcacgtgagcgcaaccaatcttttgtgtgttcttccacacgatttgtgtgtaatggccacacatctcggagttgcacgagttagatctatagttatagctccttgcttcagacaaccatccataggcggcttgagatggaccccatctattgcctgagccccaaaagagattctcaccatagggtccattggaatgggtcaaggcgcagtcaccgcgtctctggttagcccaccattgcgcgtaacgggccaatttggcgtcccactttagcggtttgagccttaaatgagctcttgctgcgttttgtggacccatgaattgttcttggtatgttgcacaatgacaacatgttacaagtagcatcatagccgtgattgcaaccgaaacacaactaggaaaagccattttgggtgaggcttgaacaaatggtatttgcttatggttttatataagcttggaagaatcatgaagagaaaattgttggtatgatttttttaatattataagggagaaagtgtcaactctatgattaagtggtgtacatgttcgattatgatagccacacttgaatttgttttgaattcttagattttgtgaataattaagcatgtattctagtatttttttatgtgtataacttatagtttatgcatagtaggtactattaatactatagattggccaccctaaaaaagtcttgggtaggaagatttaaaattaagaacttttcgttaacaatagtataataccagtattttataaacgataattggtttttttttttggaactaagtcatccagcagtgtttggatatcgatgtttcattttctttattattcaccttttgacattatcgaaacaagataaattttttattcatcaggagtttcgatatttttataagagaatgtctaaatgagtccaaatataacatgtagcgaattgttacggttttggtttcggtagctcacactggtctttgttttacttccaatttcccaagtttcatgacattattgtattattctatatacatattagtcaagaagagcaatcaaaacagattattattattactgtgaatgtatagaaaaaggaaggtaaatgttgcagagaactatacagtttttgttgatcagaaacattatgcaagagcttcagcgatgatggaacggtgagacaattgctgttcgtagaggttgcggaaaatacggtactttgcatcgtgatacttcttgatcttagggtctgatgagggatgaaccacctgaaaattcatcaaaagaaatagcataaataacatgattaatgtatgaattggggtactcaaacaaagtagttagatcagagtatacttgtccagctgcgttaagagctttcatggcatcatggagactagggtagttcttgccagcaactgctccaagaattgctgctcctaagagaacagactcgctttctcgaggaagaataatcggacaacctatgaatagataggtttagtaagattactcctggatcattttagtgattggttcgaatatagaagaggaaagcgagtgtggttggtaatataccgactatatcagcatgttcttggatgaacaatgggttctttgaaaggccgccacaagcaagcagtgtatcaatctaacatcacaggtagagagacagagaaatatgaggctgttttgtttcctgaggaagtaaatgtcttgtactgtttctatagaacgatgtgtgaagaaagttggagaaaacttactttgtgaccatgagtattgcaatgctctacgatatgacgtgtaccatatgcgattccctgaattgtggcgaggtatagaagagccaactgcttctcggacgtgtcaagagacattccgaatatcactcctttcgaatttgggtctgcaacgggagatctgtaacacaactttgaatcaatatagctcaaaagagaagaaacagagcagaattctctgttttagtcacctgtttccgtgaaagtcgggaaggatatgcatgtctgaggtaagggcagatataaatggagaacttgtatcttcagccatcgttttcaaaatgttgtttaggagttcaaacacagaaacttctgcacgagatcgagacaatggcaagtgcaaaacaaactataagacaattatagcattcaatcaaatatttcgccaagagaagtggaaagaggaagattttctactctgggaagcagcacgatttgcaagacggggagaagcaacatgattttcgatgatgtgatcaagtaaagctccagtagcactttgtcctccttctgtaagccaatactccggaaccatagctacaatagttgtttgttttggagaaacaagagtgagatttcatatatcaaattgtaagaatagaaaccaaaagtgtcagtacctgaccaaaaaggcccccacacgccaggaataaacagcttttcacgggaaacagccatatgacaagttgatgtgccacataccaagaccattcgagagcacaaggtatccacatctgactctgaaaatgccaattcttagggactcatatgtcaggttacgctatactattatagaaaagtaagtctacctttcgtcaaggagtctgattctaatttactttccatgaccccaacaccaccggcatgagcatcaatgagtgaagtcccaacaggagttccagctaacagacccagttcctgtgaataatgaaaacaataggataaaaaggaattatgtaacagaatgaaaatatagacctaagaagtagtaagtatgctctaagacccacagaagaaataaagcgattgttcttgtatctaaatacctctattttcttaatttttagtggttgctctgtaaagaacttaccttagcagcggttgcagttagaccattacccagtggatgtccaggaaaagctacacttcgtcctgtataacaatagaaataacattgtcagaaggtaaaaagtagaggtttcacagttcctctaagagcctttcttaacagctcaagcaaacaaagagagatgcataccaatcttagcatggtgcccatctaccaaatcgcctaaaccaatttcttcccagaactcatcatcccatccacaagcttccatatcacgagaagccttctcagtcatctggtgcatgtgtgcatggccaagataagtccatttacatactgtggtgcacaaactacgtgtatcatctccagtagctctagggagaaacaaaagaaatcaggaaatgcaaagataattatctcatagggaacaaaaggttaaagaaaaaaaggcctgaggcacctgtaggatagccaatcactcaagtccatccacttatacaccattgaccaagactccttaagattttctttcacccataaaagctgcaaaaggagaaatcttttttcgtcaagctcaaacacaaagaaagcaatcatataaagaacccctataagaaagttgtacctacttttggtggctccatttctggagaaacaccgccaccacagtactgcaagactggagaattaaatgagttgattctctctgcctgctttacagctctatggtccatccatacaataatgtttcttcttgaatcaccactccacgacactgtaacaggagatccctcagcatcaaccgccactacaaacaaaaataaacgttacattgtcaccgttaagctcctcttattcagccaaacacaaagacggttataagcagattctacacaccgagagagcacgtggcagcaaagcctattcctttcacttccacatccgaaacatttgcaagagagcaagcagatttcacagcagcacaaactgcatgccaaatatctgttgaagattgctgttccaataatattatcaatgtcaaagttaatctctaaacaaataagccatgatctcccttatccaacataataacctcaatacagtctccatccttccaaatctgtattggactagtagcagatcctagaagcttcccattatcatcgaacaaacctgcatcataatcaacttaagctacaaaaccaaaattgcattgctggtcgattttcaacattaaaaagaatcgatttttagtagactgatatcaaatttcatcgccactaaatcaatcatcattctcacgaatctaagaagactacaatttttcaaaattgacgagattttaactcggggaataagacagaaggattaccggcacgggcgcttccagtgccaacgtcgacaccgagaaaaacggagcgagacggaaatggatttaactcagcggtggtcatctgaacggcaacggcggaagctacggaggtgacgatgactttagtggctcaccttcctttatctactttcctttcctttatacatcataaccggattgttcttggttagtagagagccggatttagctaatttggatcggtcgaaccacggtccacgtgctccgttttttcccctgttttatgactaataaaaccctacaagtccgttctttgacctaaaaaataattctccaagttgagtcttcttactcgattcatcgggaaaaagagatggcagatcgtatgactcgaatccctgtcgtcaacgcagactgttgcaagcctaagaagtagcttcttatgcaaggtacaattaccctgcaatgactataactcgaggggacttcaagctgagattgaaccaaggagaattcacggattctcagattatagttatgttgggagagaatggaacggggaagacaacgtttatcaaaatgcttgcgggttcgaagcttgatattgatgaagaaggatctcaagtacatgagataccacagttctctgtttcttacaagaatcaacatatgtcaaaccgtaaatttgagattactgttagagatttgatacacaggaagatccctaacgcatatgcagaacaccaattcgtgtcagacgttatgaaaccgctcaagatcgaggagctcatggataaaagcttcaacaaactatcaggtggagagaaacaaagggttgctttagctttatgccttggtaaatctgcggatatctacttgatcgatgaaccgagcgcgtttcttgattcggagcagagaattatagcttccaaagtcataaagagattcattcttcagatgaagaaggcggcttttgcacgatttcataatggctacgtatttggcagataaagttattgtgtatgaaggagaaccttccgtggattgcacggcatcttctcctcagtctctacgtagtggaatgaatttgttcttgtctcgtttgaacatcactttcagacgagatcctacgaatttcagaccaagaatcaataaactcgattcgatgaaggatagtgaccagaagcttgcgggatgttattactacttggatgattaagagagagatgacattgagagaatctttcaccggagaaaacctgaagtagtgagaaactcacgttttgatctttcctagccccttcaatctattataagatctcttgaattttattagatccatctggagtttaatttttgagaatatattatggtgtttgaattcggtttgtttcaatcgttcccatatattagactagtttttttcttcacacatgagaatctcaaaccgattgcgtagaagaagaactcgcattcatctgtttttgtctttagttgagaatgaatgaccgttgtaatgtcatgggcttcttttggtttgggtctgaatcacttaagcccaacacaatcttttctttggttgaaacactgtcgtttttgctgttttgtctgacacaaggcatcggatgatgtcgattgtcgaatatgcttcctcattcggagtgttctcagacatcttgagcttctcattagttaggcggtgcgctcgaaagtcgaagccgtgttgacatatcaaaacattgggaccattcaattttgtacaaatgtccaaacattatttcggtttgataacaataaacaaataaagaaagagttttttattggattcacttggcaacagccaacaacgaatcaaataatctatatacataattatattagaagctgtgaatgtgcctccgagtagacaaaagcacatgcaccataaatgatcaaacccatgaaacttccatctctctttttcccctatataaactaatgtcacttacctcaatattccatcaacaatatacatctgagatatcaaaactcctagagagatctaataaaaatgaagtcttttacgttcttgattctctttctctttgcagcacaatctatcagcgtctatgcaggcagcttccacaaagacgttaagatacattggggtgatggtcgtggaaagattcacgataatcaagggaaacttctatctctctcgcttgacaaatcctctggttcaggtttccaatctaatcaagagtttctctatggtaaagccgaagttcaaatgaaacttgtccctggtaactctgctggaaccgtcacaacattctatgtaagtaacatgtaacgttcttgtcatgttttgctatttcataaaatgttcgtaccacttgcttatatgatgttctaatttgtgtagcttaaatctccgggaactacatgggatgagattgatttcgagtttttggggaacataagtggtcatccatatactctccatactaatgtttacacaaaaggctcaggagacaaagaacaacaatttcatctatggtttgacccaaccgctaactttcacacttattgcatcacatggaatccacaaagaattatgtaagtgtcgaaactccttcctttgtaccatacataatatttatgtttgaggatataaactcatgaaccaagaatcttttattctctccagttttaccgttgatgggattccaattagagagtttatgaatgccgagtcacgtggagtcccattcccaacaaagcaaccaatgaggctatatgcgagtctatgggaagcagagcattgggctacaaggggaggattagagaaaacagattggtcaaaagctcctttcaccgcttattacagaaactacaatgtcgagggatgtgtatgggttaatggaaagtcagtttgtcccgcaaattcccaatggttcactcaaaaactcgattcgaatggccagacaagaatgaaaggggtacagagtaaatacatggtttacaactattgctccgataaaaaaaggtttcctcgaggtgttcctccagagtgcagctaaatgattgattctttgattcataaataagttacttgacgttgtctttgtaactcaatggttcttcttatctataatttttcaattcatttgttaccaaatatatgcgtgtttgtgtaagatcttttttacaatgaacaatgagttcttccattctaaaaaccttttaaaacatgtcgttactatatacgtacaacgatacttggggataaattgaataatatataaccttacttgatggataatgaatggcccaaatttcgacctttttctgaataaaatagaattttttccaggttttgtttcaagcttagtttcaagcgcagtaggatataggtatttatactttaataaaagaattcagcgtgaatggaggcgagaagcggtgcgatattttagctgtgttgaacgtccatatcccaccatatcttcatttagcataatgcatgtgagtatgtgacacatatatttatattattgtgcatttgtgcttccatagaggttggcatcttattttgtatgttaatgtgcggatatttagttgattaatcaaaaacactttgaaaaacataatataattaaattttattgatcaattcaacagtctttgtaagaaaaattatttctgtaattggaagtgtttttaaggtttagttaaatatgacgactattatgctcttttgtatcgtttttttttggattgaacgctaaactatacgagtgcatgggtgggtctgtttggtcgtaactcgtaaaataaataaacatcagaaccctctatgcggcggggagggtttgcgcttaagtcaaaagtcagaagccgtgttgacaaataacctcaacgcaggactagcatgtgatatacattattaatatctctgttttgtaacagtaaacgagtaaagaaaactaaatattgaaggacatatataaatgataagcttactactttactagttactggttggatgacgcacgtactggtccaagattcaacatcacaattttttttacagtccaaatttccaaaatatactttatttttgttcaaattaaaggaacatttttcttgatctagatatgtttgttatgtttaaggttcgtttcaagctaatattaagaatggcttgtttcaatgtgaaaaaggttatgctcatttgtaaatggatattgttaaatcagtttaagaaagtttcctacgcactaaacgtgtcaaactaaatctcaaggctataacttattttatgtattttgatcgggtactagctttaatcatgctgttacaagattcagttacattctattacaccgtccaaacttatgttgttatcttcacccaaataaaatgaaatgttttctgctgggagatcgattaaaaccaaaagaaattatatttgacaagactatcagccaaattaaaatcaagattcaactatggaaaacttgtagctatttttcaatacctaagttttaggaaactttgccattatattggtgtttatctaaggattagaacatttattttagttaaattaaatcaataaatcgtaaagttgttaattaggaaaaaaagtattaaaatgcaaatatatttgtcattcgaacctctatgcggtggggagggtttacgctcatgtttgaaagtcaaagcagtgttgataataatctcaacgcgggaccagcatgtgatatacgaatgtctatatacattattttctctgttttgtaacaataaacgagtaatgaaattatattttattggtttcaatttgtaacaaccagcaagaggtctaatgagccaactagaatacagcccacgataaataatcaaacccatgaaacttccttctctctttcctttgccatttccaaacactatataaactcatgtcgcttaactcaatttttcatcaacaatacatttgagatatcaatacacctccaaaatatatacaaaaatgaagctttcttgtggtacaagttttgcgttcttgattatgtttctctttgcggcacaatctatgcatgtctatgcgggtagcttccacaaagatgttcagatacattggggtgacggccgtggaaaggtgcgcgacagagatggaaagcttctatctctctcgctcgacaaatcctctggatccggttttcagtccaaccaggagtttctctatggcaaagccgaggttcaaatgaaacttgtccctggtaactcagctggaacagtaacaacattctatgtaagtcacatacaatctcaaagcagttcttttaacaaacatattttattcgtcctagattattgaatattttggtgtttatgatgactttgtgtagcttaagtctccgggaactacgtgggatgagattgatttcgagttcttaggaaacctaagtggtcatccgtatactctccatactaatgtttacacaaaaggctcaggagacaaagaacaacaatttcatctatggttcgacccaactgttaactttcacacttattgcatcacatggaatccccaaaggattatgtaagtgcaacctttgatcccttgtacgtaaatttttatgttttgaggctgtgagctcatgaaccgaattctctattttctgttttctctttcagttttacagttgatggaattcctattagagagttcaagaactccgagtcaattggagttccgttcccaacgaagcaaccaatgaggctttacgcgagtctctgggaagccgagcattgggctacaaggggagggttagagaaaacagattggtcaaaggctcctttcaccgctttctacagaaactacaatgttgaaggatgtgtatgggctaatggaaaatcatcttgtcccgcaaattcctcatggttcactcaacaactcgattcaaacggccagacaagaatgaaaggggtacagagtaagtacatggtctacaactattgtaacgacaaaagaaggtttcctcgaggtgttcctgtagagtgcagttaaattgttgattctttgatacatgaataagttacttggcattgccttagtaactcaattgagttcttacatatttttatcattcatttgttgctcatatgtatgcggtgtttgtgtaagatgattttaagaagtaataaaaataaattatggaaaaaagctttcattcgtaaacgtaatgaaaatttaaaaataaacaccgagagaggtggttcattaattataacaagaatattgtttgggaagaacataaaaccataggcttatactaatatgaagaagaactgatcaacctgatatgaaggtactttgatatacacactgtagtctttcttgtcgttgcacttatttattatctttttggtaaacaatgttggaaaataatagaacattgttctgatcaatcatactttttcttcaagaacacacaaaaaaaagttccatgcaaaatctttacaagaatggaatcccaaaataaatatacttacctagttgttcatgcgtaataggtatcccacacgttattgagtattaattgtcatattaaatcatctaggactaggagtaaatcacctccaaattcgatgtcctctgagttgatgtaacatggaaccaaccaatttctgagtgatcattttttcttcattgggactaaaccacaccaaaacctttggtcttggcaaacaatcatcttcgaggtttggcgtgggaggaatgagagactatatcgtccatattcacatatttgtggactcaattgacacaacagtcagaattcgggactcttcccttaaataccatcacccaaaaaccttttccggcatacaaagatggttctctcccttgcagaatggactgtttgggcctaatctttttcttcttaattgcccctatttatttggctaaggttggattttcttgtggggctttattaatcagttatctagggtacgggtgttggttttttaaacattgatggactactcttgctactgttatagttgattaaacacatttataagaaaacaacaaatgtttgtacaaccatggtaaaaagaatcttgtgaatcatttgacaaagaacaatcttgtattcttgaattcttagaaaaataaatatataaacgagtttagcctcacagcatgtgttgtttttttaataattcttattgtgtttgaaagtgctggtcctgagagtaatccatatattgacctaaaagtcaatgctcatctctacttcaaatgtcttctagggcaggttcttctcgggcttgccaattggccatgatattcctaaaaacaaagtgaaaactgattagtttgaactttgaatgtataaaaaagacttgtttactcaaaagttagtttcaaaaaagttcattttaatataatattagctataattttggatatgtggttatatgcgattggaagagaggatgtgattgatgcacaaataaagtcatccattgtatataatgcataaataaaccatgattatcgtcaaatcatgcaataatttttaatcttcgtgttagcagaatattagagatttttttaaaaaaaacataaaccttagcatcactacgatctctgttgtcaccgcaagaaaaatattttgatttaatatacaagataacacaatattagcttttgattgatttccaaaagttgtaacttgtaatcgaaattcacaaagactgattagtgattactcagcggctcagggcttaagagtttttgtatttttatatattcttcagaatctgtaatagtagtttatttggttttatgagaattaggatttatgtctataaatttatatgagaaaaaattgtagttaggactatatatggttttcggtaaggaaagaaaaacaatgtatatataataaaaacttttatttatgttttgttttttgataattgtgtttttatttatgttatcaataagtgaatatttgttgatgtttatccaatgaagttagtattttgttctttttagggtcgagtggtcgacgtgaagtcgttatttaaacaaatggctaatgataatattaatatttaattagcgatgattagagttcagagaaatgttcatagtaacatccttaatatattattattggccataacaaagtttgaaatagtcaagggacctaaagaacaaaccaaaataattgatgcaccagttactaattacgcttatccaattgagataaatatgttactttatgaaaatgacattcagccaattattttagtaaaactaaaaaacaaaaatatttgattaggcacaatttgttttgtaataaatttctgtgaataatttattttcgaaataattgtgtggttgtgtggtgagactacaactcttttcaaatttgacatgcattgacgaatccatcgtcatcagtctcatcttccgtgacacttgactaatagagaactttcaaagaaatataactctgaaatatcaaactgttactgtatataacataagatcttgaaaacattaaatcgtttaatatgctttgtattttggtaataaacgttttgtaccatatgattatagatttaaccgtctataacttaaaatctctcgaacagaacgcaaacaacacaaaagtgtgtgttttattacccccaaaaaatgtgtatccatcgttgaatcacaatactccaaaccattggtctatataaaaccttcaattgatggtttaggattgaattttgaattggtgataacttactttcaaaaatcaggccataagatatggttaattaccctgaaaatttgaattacatgaactcattaagcactatagtttcaaaaaataaagataatccaataacatttattaatcccggaattgacaagaccagacttagttgtccgaggtatgggttcgttcaaatgacaaatattgttttgagctaatattgatattaggcctttgattaagaattgttgatgaaccattataacattaataaaattaagttcgaaatgatacagctgtaaagtagtgggaccaagttgacgtttggttaggcggtccaaatccaaatttccgtgtcagggaaaaattcatccaatgaatcatatgaatatgatatgtattatgtataattgtatataacttctagtagtaattaatagtgtttgctttaattacgtagcttatcccatctttatggtccatactattacttactcaaaactaaacactatatactatttaaacccaaactatcttctgtacttttctcaagttatgtcactatgtcagcgtaataagaaaattaacttaagttagacaaatgatattattctactacaaaacgtagttcttttatgtgattagtctaacattcgatgtaatggtttatcatttatgttacggaagaaacattcaatatatttttatgaaaacaattttatcattcttatataaactcatcgaactagctttaactaaattattcaaacgtgttagtatggaaagattacatttttctatattctatagttttatgatattgtttggcaatgatgtgaaaactcagtatgattttctgaaataatttagaccacttatttgttattacaacttttttgattggcatgaaacaggagacaaaaatagcaaaaaattagaaatatcaaacattacttgttcctttatatgaacaatgaggatgaaaatagctttggtgcttgaaaacaatacctttgagtttggaccactcatattcattagtcatttccaataaatatcagtagttgccctcatagacaaacattaaatttcttttatttgtggttcctcagatttaattctagcttaagtactgtggacagctgttttaatttgtcaaatgtgtataccaatcaaattaaatttctgaatttgatcaacaaaagaaaaccactctaaccacaaccactaatgcgtgtgcatgcacacaatatattaatatatgattctataaaataaattattttaccttattggttcttaagattaaactgaatatctacatgtatatctcagtggttccgttttttttaaagtaaaacatacaaatattacgtatataattcagctttactttggttcatattctttttttctttgggttcgtattctttctcatacaaaagtttacatcaacaattatatcatttaataggattagaaagaaaacaaataaagtagacctataggtatggttgcacatattgattagtgattaatatagttttgtagtattttgcaatgaaacatcttaattgactcccatcattaattagtgaccaaccaaaagaaattgaccttttgatttagaagaaagagaaggaaagcgtgtgtgtggttacttgcttgcaactttgctaacgcaatcaaatcttttaacccatacactatactcatacttttcttcgttgcatctattctcatttcatttcacacaataatatggagtacaatattattttaatcacatcgatcatagattcatgataatattgccaaacaaaatgtaagcttaaaaacttttaatgttaaaatgtccaaagaaaagctcgacgtgagtcaaagcaagttgtttttattccaaaaccatggtccagttacgaccccataataggatacatacaaacttgaaaagttataaaaaaattcaagaaaaaaagatattcacaagacatattctcttcatatttcaaccaaattcgagaatttgaagtcgaacaattccacacgtaatatccctctagacctctggtttcttctttccttcctataggtctcgccgtagtgatctaagctttatgaaaacatttgaatttcgagattcgtgtaaatacataaataaataacaaaagatgcaaccaattatatagcaaacgatattattaataaagattattaaattataacacaccaagaaaaattattaaagtatatcctagcatttactaatagaagagtctaattttaattttgttattgctcaaacacagtatataattttagagatttctttggtttacgtcaaaaaagtctgtctcaattttaatattttagtcggtcatcagtatcgtccaaacaatcattttacttttgttatgataaaatacggaattc

SEQ ID NO: 649 - DNA, 77860 bp, Arabidopsis thaliana
tgtgacagcaagtttcagtgttttgtcttttaaaaaaactcttaaagcttcttcttctctcatctcatctctctgaaaaaatgccgagcaactgtgagattctgtgcgagatcattatcgcgatccttcttcctcctctcggagtttgcttcaggaaaggatgctgcactgtaagttctctctctctctctttcgaattcctcaattttgaagaatcctggaacttcttatagagactgtaattttggattgattataatgtaatttggtatgagtaatgaagggagtgcttaatctatgatatgaatcgcagaaattctctggattggatcaatttatgtttgattcattgattcctgaaagcttggataatcatttgaagaaagttgaattttttttatgtgtggtttgttttggcaggtggagtttttgatatgcctggtgttgacgatcttaggctatgtcccggggataatatatgcgatttacgtgattgtgtttcagcaccgtgaagagtactttgatgaatacagacgccccatctactctgcttgatttctgtttctttggaactgtgttgctttgacttgtaccaataaagttgctttgcagttgttttcagagatttgaaaacgtttgtgtgtcatttatatgcaatattgaaagtttcttctgttatcagcttatgaaccctcctgctatgtgtgcttatgcatcaggttgttgacatagtgttttcgcaaggcacaaattaaattattaaattgaaaggttaaaaaaaaaaagagtttaattagaaggcgaagaacatcaacagaattgagctcgcgaccgtggaaccgtagcgcaatgccatcgagagacaaggtcgactagtagcggatgatccacccgcaccatgaccactactggggacacgacggtggctacgaccaccaccacgactaccaccaccaacaccaccaaaacgagctttcctcatgaaaactcgaagagagtcatgatgatccaacggattggagtcaccgtgttgtgcaagtcttcgttcactctccttattttcagatgaaattggcaaaggctgagagagtaacaataggagtacaatcaatgaacaagaaaatgccagtgaagtcctcatttctgttttatcaaataatatgtgtgtatatacatgtatctgatcgaaaaaaatcagaaatatgtgttaattttacaatgatgggacgcattatgtgtgcaaaagaattagtatttataatatcgctaggcttaggtaacgaaacgaccatggcttaaacatgggctacttcttctttgaaatgatgtttaatactattattgtatttaactattgggatacttattacttattagcaaagaaactttccttttgccagcaacaaagaaagtttccgagaggcaaaatctaattacgtaagggaggatcatgattaattaagcctaatgggtaacagacccaaatgttattatttatcgttttcttatgtgaaatggaatttagtgaatttccaacgtaaggcaaatagtggtcgaagggaaatggtgcctagtagttagttctaattgtaactgaatttgattgaattcatgtagtagatgttttaaagaggttgttgttaatggtaagaataaacaaaggaacaatgttcactatacctgcattctctctccactcagtcttcaaaataattgatcgtgagattaagaacactatcaccgccaaaaaaatcaaaggggtcacttctgaaatcttatggctgcgataaactggcccgagattttcccacataagtttgttttcttgttttttactcttttttttttttggccaagtacacaattgtataggtttaaccaaagtgtaagttctgattattcatattaatgatatttacaatttagcaaacaaacaaaaaaattccaaaaatagtcgcatgtagttgtgtgtcaatgataaattgtcttagacaatcagttattattcattaaacaaaacaactggaaccacaatattagacaaaccagatcagacaacttttcaaacattgaagacttacaaactcaatctttgccggaaaagaaaacaaatcgttaaactcgatcggaaatacaaactcaaacaaacacgcaaattcaagccatttgacaaataaaataaaaaagtcgcaacctgttatcttggattaaaatgcggcgagcaataaaacaaaggaactcacaacagtagatacataggtaaatgggttagagagaagggttcgagtggctgctgatttgtccttcttcttcttgctcttgcttttgcttttcctcacgaagactcgaagatggtcgtggtgatgaccggatgacccttccttgttctcttcatgttcaactagttcccgacccaaaggagtgatcgtatggcgtccgcatgaaattatgagggattgagaaagtaacaagagggagatgatcaaaaaccaaccaagaagagaagaagttctcatctttttcttattctttaaacaaaattgaatagaaaatatatttatcttgtgttttttgaacttatgagtgtgtctgtgtatttatagatttgtgtgaaagtagttgtaccatactctcttcttcgtgcacgcaaccaaacagatgagctcttccttaattaacaactaggcagtgatataatcatcaagacagctcataactgttttttcttttggaaaacttcttacttacacaagagacattttgacacgatccaggatcatatgactctgtcaacgtattaaaatctcaaattttatatgattgactacgtatgaaaaatgggaaatatccttaaatgtcatttttcaatgtataaattagtgtgatattttttaaatatctattttgaaatgctcatctgttcccattaaagtaaaccaccaacatgataaaatacaataataataataatgattatttgacaactacttgattatttaaattaaacttttcattccaagactatctataaagagtacaattcaacatattcttttctttttcctcatcttgaactcttccaaatgaataatgaactaaggcaccaaaagaaaaagcacaaaccaagaaaaagaaaacagagtaataaaactgaatctaatttcgattacaagtatgatattaactcttaacatttttcaataaatgattacaagaaagatctcacctgttttttccggcgagcgtggggtcttaaactgatcaaaacatgtattgagaagaaagaaaccacacaaactacaccaaaccacggcaagcctcaacctctactgcttccgtagtgagtagagactcactaacactcctcatcacagcttccaagactgctttcttgaaccattcgtctcccattttcattagaatctctttcaccaactcagaatccgatgctttggccataaccaaactcccaaggatctccccaaagttgtttggcgcttttggcagatcgatcccaatgtcatcgagcatagacccatagagcagacaaccattccttaagtctttaggagttagaacattcttagagaccagatgttccaagagcttcgccactggttcaacacaaggagggttcttctccaagccgagggagatagcttccttgacaagctcaggatggtaagacggggttttcagttcttctatgcattgtaatgcctcatccaatagacggacattgaaatattcctccaaaagcgagttggtctttctactgagctctactgtgttcaagctagtagtcgtaggaggagccacctcctgtggctgtggttgtggttttggcttctccacagtttgtctggtcggggaaggaacaggtttaggctgttgggaaccattaccttgcacaagggcacttggtctatcgttcagaaggcctccactgccctgaggtagcagccttgaattacctctctgagctgaagcagctgttctcgagtgaaccgcaaaagctcatgaccctcaaatcgcgagtctcctttctacaaaacacatacaagtcattagacttgaacctcagaattcgaagcaacagatgaaaaacatggttggatttactacgtataagctcaaaccaataaaatgtatataagttatatatgtaggtcctttatgagcatcaaaaactgatagagtgcccacctaaaagcctacaaatattaatctttgtccatatttacagcaaggtcacattgcttaagcgccccaccaagaattaggacattgcatactaatgttcaacaaagaaaatctaaactcttaacacataagaatcagcaaaagatccaaactttatcaataatccaagtcaaaaccacaagaagcaatccgacactcaaaatttacagctcatagaacttataagaaggttacaaacataaacaaatcaacacacaaaaaaaaaacagaggatttggataccttaacggcaaaagaaggagcgtctccgccattggtaagatcagaggaagaagataaggtaaagcgtggggcaaagcgtctgcttcctccacgaccacctccaggcctcaagctcagcattgagtcaccttgctgcatcactcgaatctttcgttcgcgttaacaggaaagacagaagcagtgttcggttctgaaaatgcacaagacaaactaaattagagtctcaacgtcacagtaatcaacttaacgcagcaagtagatataaccgattgaatcacaactaatttagatggtaaagttcttctataaagacgcagataattaggtttatcacaatttaagacaaagcctaggaaaaagaagaacaatgccgtctagaaacaaatctaataagtggcgaaattgaagaagcttttacctgagagattgagagaaagagagaacgcggcgcagagcgttgcagctgttttattgtctgttttagctcttagcttctgtccaaagcatttttagggtttggcccaaaaagcttaaccattttggaaaatattattaaaaaacattaaacttgattatcttttaatactgagacattttatatcaaatttgtaaaacataaaaaaatgatcaaaaaatcattactcagtgattagtgaaactgtagttacaagtacattatgtcactatcaataagctaagctaaattcacaaattcatttcttcatttaaaaatctttaaagtatagattttttaatctgatgtatcccaatatattatggataagatagatttttttttgttcttttgtatttaaatcggatcattctaattggtggagagacagactctggactctgaagaagcaaatggctgggatcaccagcaccgttggattcaacgccattctcgccggagccaccaaaacggtgtcgcatcctgttaaatctaagctctttggtcttcgactctgtgtacccgaattctcaattgtttctctttccccttatcatcatcgccgttgtcccgccatcacttgccgttacggaggcggtggtggcggaggctctagatttcccggcgataggagaggtaggcagaaagaatccgaggatgatgattcgcttgatatctcagctattaggtaattgtggaaactattaattgatagaaattgaaatttctgtagctgaagttatgattgattttgatgtatctcaaattgagtaggtcagccactgttaggcttattgatgatcagcagaacatggtaaaatgaagtgccttttaaatgtttaaactttttgatttcagcaaaaattgaaaattttccagtttctttgttgtttagattggtttagtttccaaagaagaagctgttcgaagagctgaagatgctgagcttgatctggtttgtgtttctttggataatttacaacttgtaagtacctttcttgtaagctgagcttgatctcatatggttttcaggtgattctttcgccggatgcagatcctccggttgttagaatgatggattacaggtaaattatctcaaggatgataatttgtatcatatacattgtgtagaggaagtttcaaggagaatgattctttttcctttttgcttcattatcagtaaatacagatatgagcagcaaaagaggaaaaaggaacagcagaagaaaagtattgatcattcttctctgcttaactggagataatgttgaaactataagtgtgtatactgtgtcgtattttacatgaatggattgtgtaactgaagctttcttcttatgtcagctactcgaatggacttgaaggagcttaaaatggggtgatttgagccattttcactatctcttttatctgtgtcgttgtgatgcttttgtttagaaaagcttcttctcaaaaggtttttgtattttgtttctccggtagttataacatcgatcagcatgattattctgtacgcatgagagcagcccggaagttcttgcaagacggtgacaaggttgtccccacttactttgttttgtgttataggcgagttctgtcacattttgttaatgtgtgacttgtaatacactcaggttaaagtgattgtgaacatgaaaggccgagaaaacgagttcagaaatattgctattgagctcctcagacgttttcagactgaaataggagaggtctgtattgtttctctatgctctttcctaatacaagtttggtattggatttgcaccttaatggatcgtttttgttgagtcactgaaactcatcaacatatgcagcttggtactgaggagagcaaaaactttcgggacagaaatttgtttattgtcttggtgccaaacaaggaagttattcggaaagtgcaagaaccacccccaaaaaagaagaaaaagccagcggatgataaagtttcagcagcaaatataactgcaacacaagatatatgatgcggaattgtctgatgtaaaatgttctgtgactttgataaatttctgtatagtttcttttttaatatgcttcttgcatttccatgtaattgtaaccatagaaatagattatttgaatgaagatcttcgtcaacttttttgtatactataggttttcaacttttaagcgtagtcatgtagattgtaacaagtaatcaagaattattgtcaaaaaagaaatcaattatgagtgaggtaatgttacaggatgagtacactatgacttgtgttgaggccaaaaacgagtcactaccaataatctccacatgaacagacaccgtctttgaagtgatggaagcggttggcatctcttacaacaatcactctctctgtgatctttgagatgagtttggttacggtgtgacagtctaaacagactcgaagattctttatgatccggatttcagttcctggctcagtagctatgagtccaaaggcaatggctagcctctcgctgtgaaccttcaccatcagctccctttcttcctcctccacatcatgcagggccaactcagtctcgggttggtacccagcttccctcatcttcccttcaagcttctccagcttctcatagatttcctttacctgtggatgtgactgatcacctgaggtaaagacatgaggcgtttcacctatttctattaaggtatatccaggagctttggctagtttcctcttctttgcagtttgtctaaccgtagcagcctgtggatagtttctatcagctgagtgaatattcgacagcaaaacatggtatcctacattgtctggatctagctcaaagagcttctcagagactgttcgggcaaggtttgtgtctttgtgaatcctacaagctcctagcaatgtttcccacacagaagaaccaggctcaatcgacattgcctctataaactgcaatgctctctgtaagtgtcctgctcggccaagaatatcaaccatacaggcgtaatgcttgactgatggttcaaaaccataccggtggatcatggaattgaaaatttcatcaccttctttgaccaagccagcatgactacaagcgtaaagaacgcagaggaaagtgactggtgttggtgtaataccggaattcaacatctcatagaaaatattcagagcttcttgtccttgtccatgaagtccataaccagaaatcatcgtgttccatgtaacttcattcttctttgtcatcaagtcaaacaatcggcgtgcttctgcaatgcttccacactttgcatacataccaatcaaagcagtagacacatatatgctagactcaaaatctgtgctccttactaaatcatgaacccatttccccaaacttaaagctcctaactgcgcacaagctgatagaatacaagttattgtgacagggtttggactgaattcagacttctgcatttctctgaagagagatatcgcgtcctctgtcaacccgttttgggtgtaacctgagatcattgcattccaagatggcaagcttttttccggagactcatcaaaaagcttccgggctgattctatctcattcaatttactataaaccgtagttaacgcggttgagacagaagcatgagacaggaaattcgatttcaagcagtaaccatgaatggcatatataagcataagatgaccagagacagggaccagactcaccaacgtgcttgacctcaaccttgctcctgataacatcagctctttaaacaggcttaaagagagctcagtctctccattggatgtgtacccatgaatcattgcattgtaagctactatatctggtttacgaaactcacgaaacagagcacttcccatcttaatctttccacactttgagtatagtgagatgaaaccagtaagaacataatcgtgggagtagcacccagtttttgtagcaagactatggatttgcatgccgagtctcagctcctgcaactctgcaacagcgggaagaatatcaagcagagttgtagtgtccaaacgggtacagctctcattgatcaaatccctgaaaacctgaatagattccacatacatttcattctttcggtagccagatatcatcgtgttccacaaaatggtgtctttctcaggcattctgtcgaacaccttcctagcatcttcgactcgccaaaacttgaagtacatcttaacaatgttagacccaagcagcaattctgagtcacacccatcaacgaccgcttgaccatgaataacacggccagctctgtcgtcacgaaacccagaagcagccgagatagcgaaggcgtaggtggagctgttgggcttgagatcagtggatttccttagatgagcgaacacagagagcgaagagtgaggtgattcgttgacggagaagccacgcatgaggacgttgaaaaggaaaacgtcaggtctttggacggagaggaaaatgtcgcgtgcgtagtaaatggcgccgaggtcggagagtcgttgagtaagcttggtgagcaatgagatgtcgtttcggaagccatggagaatgatctgagcatgggtttgagcaaggtgagatatagaagttgatcttttgaagaaatcgagatatgtgttcttgcttatcaatgcggcggttgtctcggcggtggcggacgatactgtccgtagcagcatttggctttttgcctttcagagaaaacgaaacaactcatttttgcgttctttcactttcatttaaaaagtattttacctttaatttcaaattaaaagcatattaaatgttcatttactgtatatggattataatgaagaaatgaattttcaacttcagtttattaggtgaagaggagcacatacacatcttgttagtgaatttttgtcaaaaaatatataacagaaaagccaaaaaacagtcctaaaattaaattttgttatgatttctacactaaatgatactaaagaataaaccccacatcagagcttacatgtgatttgtgaacaaaataaatttcctttttggtatcctaagactttcgaactcgtgatcttccacttccttttttcctaagctaatgtttttataccaaaaaaaagaagaagaaaacttcaacaagcaaagatcaaaaaaggatctcgacaagagaaatgtgggggcatcaaagagcaatttacaggtgatcagtgttgagcgtgtgggaactgtaagcttttgttatttatggccatggaaacttgcttaatggcaacaatggaggtggagtctctgcgtcttctccttcttctcgcctagtttgtatcagatgagtcctgagactacactcttctatctgttcattttacaaaatctcagtttcaattcatttgttcattatagtattggattgttattcatttacctgcatgatcgcagttgaggccagaagatcttcgcattttccttgcatagaactctcttttgttactacaacagcgagttctgttaccattatgttcatctcctccacctgcaaatacaaatcataaagagcagtgcaccccacgtgagagttatgtcaagaggataatttggaaaactcatttattaaacaggtctcacctttgagagtaaagaccaaatggacgatcccatagcctgcattacatcgagggccgaggacatagctgctttcaaagattctgtgtccgcctgtaggaagagaagttataaatgataactaaatgatcttctgaaatttcgttcccataaatattcgcaagtaataatatatatacctttgttcctccagtagctggaaggcgaagagtgtttgcttctaaatctgatatggctccaactaaagaactaacatgatctctttcaagtgtggcccaatcttcaaggctcaccatctgtgcacatatttatgcataagcacggcataatctgatgaatacaaagccagaatacaacagagagacaacatacctgatcgtttaataatgagttgagcttgatctctagctttagctgttgtaggccaatcctttgcctggtcacatgatcctgtagttctgatatcgcatgccacacattgaacagtgtttcctgaaagtcaaaacttaaattttcagacgtctttagatcaatcaattaaaggatcacattatatagaagacagaaatgttaaatacctcggaagttagtcgttgaatatacattacagattcagctcgtgcaattgcaaatcgccactgtaaatatctattgtggagcaagcgcagttgatgaacatcttcgatatagcttgcttttttgcctttcttgacatccgtgatgaagctgagaaccgaagttgtggtactggattgtgtggaagtggtggtttgtcttatccgtgaaggacttatccctcttgaaggtggagttgatggtctagcaaaacaggatgtatttgtgccgcgcgaaggacttaaccctcttgaaggacttaaacctcttgtaggactcaatcctctagaagggcttagtcctcttgatggactcactcctctcgaagtactcatacctcgggaaatagacgatgaagacaaaaacgatgttctacttggtgaagcagggcgagatccaggagcaggcaatggatgcaacctagctacagccgttgctaatgttgctctatccaacgaacctgcagacaatagtctttgagccccagaagttcgagctatgttattatcttccgactttgttggagacactaagccaccataactagatgtgttactagaagttttatgcaaaggtcgtgaactgctggacaatggaagtgacattctcctaagagacggccccattccaggccctgaagttggtataccccttgaagccttgtcaccaagatccaagcttctgtttaaagaattcgaagtgatctttccaccaattctactaggccaccgatgctgttctattaaccgactatgaggaccatctacaggtttcgaattctctgaaagatcagacacattattcttccctttcaatggacttcttttcctctctggcgtaggtttccttgatacagaggtcgtttcagccttatgcttttgagctatattcgaagaaggtctcaatgttcgatcaccagaagaactactaaccggtctctccttcttactaacagggacagagactgaatcagactgaaacgaaacactgaggcttctcatagtggaaggccataagctttcaggcaaacgaccagtagatagcctcctagatgaagctggtaagtctatagacaagtcacgtatcggcgtggagggactagtcggagatggtggtgttgaaggacgcttcctctctgctgaaactgctctttttgcagccacagattgagagcttgaagacactgttggccttgtgacgcttggggaagggcatcgcccgtttttggtaggcgtgggtgatctgtatcttgaactgacctccattgttcgaggacggcgggtggcaacaactgcattgttcttgtcggatggaagaagacgccgccttgtagtatctgttgctacatccattcaagctaacgaaacaaacttgcattgattgaattcagcagttcttcatgcctctcgtttaattatgcgcttggaggtaaacaataaaaacagctccagttgctgtaaatgaagtccctttattctgcaagaaacccaaaacccaggagacaaagtaagatacctcacagataggccatgcggaaaaagagcaaagaatattagacagcccagataaagaaaagtaaataagattctacctttacaacaacaaaaaccactcccacatgtattatctaaggggaacaaactaatgacaatttcatcatcattacaatgaagaaaacaaaaaaaaagaagcaaatccaaactataataatcaagaaagagcttaacagtgaaagagataagaaaatggtgtagaactaggaaaacagtggtcaaacaagagagacagacaaaaaaggagagaaaggtgggttgagttctaactagttagctgctacagtttcagaatatcaggaatatttttttttaaaaacaagattttcagagaaagaatcttttacagtgtcacggaagtgccatggtcagatgtgctggaaaattaaatgaagattttcgattcaatctatataccaatcttcttcttcttctttacatcaacatcacaacacctcaaaagataacaaaagaaacttcctttatcactttgcaaacagtaaacttacaaagttaataattagtgtcacaatgttagatttgtacttttgtagtagtagtaatatatagaactagtttaacacttagcaaaaatggacattttgacagatatttggtgttttctccaaaaatgggaccacgtggattgaagaatcaagaaccggtgcccactctccgagagaaaatcaccggttgatgattgattaaattttgatcatttgagaaataatctcgagaaagtgaaggatgatgaaagaagaaaatctggtaatgaaaaaaacacaaacttattatgtttcttcaaagtgaatgagatggttctgacgaagaatccaaaacggaaattttgtcagttactgacaccacgacttgtgtctctcaatgacacagactctttttatccaatcaaatttagtaatttttccatgaaattgcaaaatcctcacaaattataaacgaaatgagattcattcatagtttctatcaatgatctaactcatgaacgtcagatcgcatttattattacccagaaaaaaaatctagggttcttctgattttgaattagaatcaaaattgggattgatgaaaccaaatgtagaagcttaaaatcagagatccaatgaatctgaggttgggagatagagaatcataccagtaagaaaacataagagtgccaaaagtaatcaaagtctcgtgattctccttcgcgaaagacttctctatgtcccccttcgagatcgaatttgggaatacggaacgtgatcggagttgattagccaagctggagaattggtaaaaaatgtttcgccggcgatgaaaaatgctagaccgccggagatagaattgatcgggcgatttaagatgatgggttcgaggagatcaaagagagagaaaaaaaggaaagagtgagagagagagggcgttattttcgcgccacctaattttgatattaaaagggtctttttatttttctctctaatccgaataataaaaaaaccccaaaaatctctctctaggccttttttgctctacaacaaagaaaaaaaaacatataaattgagtaagcaaaaccggtttaaccggaataaaccgtgatgaaatttgaaccggaatccttccatcttcggtatcaatgatcatgagattgtagttttctttggtactatattgattgttgtttggtttaatgttaagatggtggtacttataaaagaaaatataatacttgcaatggatcgagactaaacgtgacaagattatggtactgatcattgcttctagttgtttttcttttctttataacactttttttatttgaaaattggcattttacgccgaaagcttctaatttacacattctgttacttttcctacccaaccttacctaaattcataagagttacgaggaaacaagctctaagacaatgaataaaatatcgaaaaaataatataaattttaggagaaaatggaattatgatggttacccatgatgatatgtgtttggtcatttctctttctttctattttttttatttggtcttttcttctactttgaaaataatatttaccaaacacttacgatggctaatccccggcccaactaagttttgtttactcataattttcttgttaatttattctattattcaatctcttgaatcttattcattttatgtttatagtatattaagattagtggctaattgtatccaaaaaaaacaataaatatatacagtctagtcatcgacgaggactctaaagactaattaaacaccgtaattagtatgaggtttatagtacataaacacacgataaagtaatccaatttaaaaatagaaacaatgaataaacccatttttttattatgagaaaggtttgctcccacatgagatgatttggacatatcatatgatcgtaagctttctatagtagacctttgtctctcattcttttgtgtgtcccttaccttgtggagtcgtactccaaactttacttccacttggaattcttatgaatttattaatatcaaccttctcacttttgtattgttagagatattttgttttatgttcttttatattggctacacatgtacgtactgccaatttatttagaatcattgaacctagcatacatttatgcgtatatgtgataaatctactcgtctagtctcccgtggtccgttcaatgattcattttggctaaaaatcttaagattaacgtttatttcttttattgaattactgtatatgatcatatcatatgttattggatctttttccaacgcatttgtagttagtacacatgtgtttatattgttatcaaactaaacagttatctatatttgcgctatatccaccgaggttgttaccttcttcgaaaggataaaagaagatcaatctataaaatgatgtatatgttataaacgtgctaatataaggattaaacttccggacaaagtaagtattgagtattgattagcaatagaaacaaaagtaattgaatattacctgttcaattattttgtaaacaaaataaataaacaaataaaaagattattttgcttaccgacatattttttttatgtttcagaaaaatattagtagtatatgtacaaatgaattatgctagttatctatcaaatccttttgtacaagtgtactcgaaatagaaagaaaacaaaggaagtaaataacacctttttgtataactgtactaattaaataacattataatttaaatcattattatgggtataaaactactattataatcctcgtatacttaattaagtatacagaaatgaaaaataaatatttgcgtcttggtgtgattaagaaagagcctaatgatgggtattcacgtgcttagcagttagcacaattatattgaccacactaagaagaactagagttattatatatgtcatgtcttcgcaatgtttcttagcttgtctaaagcttgtcgttttcttgttccctcttacctatattagctctaggcggtgtagtttcctcgatcaaattgtttcggttaccgttaagtttttatttcgttgatcaattcccctttttttttttctttttttttttaaccatttgtaagatacatgtttacattttgatcacattgttttttaaccatttgtgtttcttatgaacaagagtcactgccttcgataatgtctatcaaaatgtatttggaactacttagattgggtgattatggttgtttgagtcgtatcagttactgcaaaacccataagcagaaaacgaaggaacatgatttgacctagaagccatttgtagttccactaaacaatgatgaagtaaattttcataacagtactgatgaaaagatagttattggatacactagcttactttcttcagtactactgtttgggttagttacataactaaggcaaaattctcttctggctgctgatgacgattccttcccgcttctgatttgggccttttctgtataagtccttgagctatggtacaacaaaactggattttggagcagtcccccttgatgttcttttacctcgacaaaacccgaacaaacaaagatggatgaaagctatgactgtcttcttcatcatcctcatcatcagcatcatcagtactttacaagtccagcaccttgagcctttccaataactgactctatggttccatcaaagagatcaaagcttttcgcaacagcaaaacccgaaaacataccatccactgcagcacttacaattccaccagcataaccagctccttcaccaactgggtatagaccttttaagctcgtactctcgtacgtctcattgcttcgaggtatccgaacaggggagcttgttcttgtctggttaaacaaagttgaaacatgttgttatctctggtctgaagagtagactgattcaggacaaggaagatatataacatacctctacgccgtggaggagtgcttcctctgagatgaatcccggtaactgaaaattcaaaagtttagagaaaaacagaagctacaggtttgtttaccatatgtagagatgagaaaatgtctaaccaacctccttttcaaacatagagatagactctcgcagagcctctgtgatatgagcaggaaacagttcatgcagatttgcagacttcactcctaatctatagcttgatggaggtaaaggtgtttctatttaacagcacaagagtatccataatcaccacaaaacgaaccaacaaacaaaatttgaaccataaaagtgagaactaagtattaaggaaaatgttactaaccagatagcttgttttgcagaaaatcagtaaccctttgtacaggaactgtaaaatcgccaccacccattatggctgctcttctttcaaattctctctagagataaacaaatcaaaggagaaatattgaatttaactcatgagtactaatagtaatccactttcagattgatacctgaaactcaattccagctaagggtcctttaagattgagaacatcaaaatcttttgctgagactgtaacgacgagtgcagcattggcccatttggatgaacggcgagaaaatgacatgccattgatgcagagttcggttgggtttgtgctggtgagaacaacctgaaaatacatggaaacaggcttattcgtgacaaatcaaaatggaaaaaaaaacagcaagacactctttaaggtaactgtacctgaccaccaggacacatgcagaaggagtagcaactgcgtttcgatgaagactgcgagagatcctcggtcttatcattcacatactgaacaaccttataatccgccactggtactttacctcgccctttaagaacttcattagccaaatccgagtactggaaagaaagaccatcacaagaacataggtgttttatatacaagtcaagacttgaataacgataaggtacaacaaagtctgatatattgaaggttatagtattaagataatcgaacaaacctgtatactgttaattagctcctgaggatgctcaatacgcaaaccaacctgatccacacaaatcgatagaaatcaaatgataataccaagccagggaagataaaagtatccaaatatattgattcaaaatggatattttataaaacaacacactcaagaaatatgtacaaggaacttacagcaaaatcttttggaatcaattcgacattacgagaatgaagcatctcatatgtgtcacgtgctgaatgaccaactgcaagaacaactgcatcaacctttaaattctgggaggtagtctgcaattggtttgttgaatccgaaaccctgactccaacaacacgagaatcctctaccagaagatcatctacccgagttccaaacttgatagtcacctaattaagtatatggaaatgaaatcaaagagaatgctcagaggagaaaaaaaaaaaaaaaagcattaaaaagtaatagagagacatagatcaatctctcattctaaacttactcccgcactttgaagataatgtctgaaattacggagtaatggaactagcttatctgttcctagatgaggctttccgttgaccaatatattatcaggagccccaaagcgaaccaacgttttcaacacctgtaaacaattaacgcagtggtcacaatttttccttttgtactcaaacatgaagtgcttcaatttaacatttggcagtctcaaaatactaaccgctagaacggtggcactattctttcctattcgagtaacaagctttccatcactccaagtacctgcaccaccctgcgatgcataagtgctaaaatatgactttgacaataacaaagaaaactagcaaaagagtgaagagaaggtttttaaacctcgccaaagcagaaattactctccatatccaaaatcttgcgaactaccaaagcgcctatatcacgtcccctttcttctactgcttgccctctttcaatcaatgtcacatctgcaccgaactctgcaagtacaagagcagcaaacaaaccagatggaccaccaccaacaactgcaattttcggtttgcttcgtcctcctccatgatggtgtggatctccagagccattgataatctgaggttcatattctccggatgctgtctcactgttgatccttttacagtcattcaccacactgatcaagtcccctgaaacactcttctcggtaggcacatgttcaataagcccaatcttaggctctaaccggaaaatgaaatcatgagcacgaggctctaactcaaggagcgtcttcacatccaaatccacagtgtaaacaaacttggcttctttcagaatctaaacaaaagatgaaaacttcactcacttgaaactacaatacaacataatatgtggaatcaaactgaaacctaccttcctagcgtcaaaagatttcctaatcactgaaaatgcttcttctggcagcattgaagcaacctgaaacaaaacccaatttatcaaaaattccaatttcatcatagccataagataaagtttcgaactttccaccggagaactcaccggaaactcgataactttagcgatggcttgaagcaaaccttctgaaatcccgagaaagtcctttccagggtcatctccaacaggaactccgagcttagagagacgccaaactccttcaagcttgttcttaaccttagccacagcttccttctgctctgtcctcagcttcctcctctcagaaggatatctccgcttcccggttcgcttcgcagcacagagaatccggtgtgtttggatacggggataagaaagtaccgctctagaataaggaattcgcaggtcatggctcgatgagagtaatgaagaactgaggaaattcgtttgcgagagagacatagtgagagagagctcaaactaaaaagctcgtctctgtgtctaatgagttatcctttcatttcaaattgaatcgactcgagtccggttatacattaatcgttgattttaatccggttcggttgatacgtttttgaatttctcatgtataatgagaaccgaagttttcattttattctgatggtactatccaagtgcatgcaacttacaattttgatcacctctgaaccgtgtgacaataatcccttactaagaccagaagctttgtatgctccaaatgcaggaatctataaataaataaaaagcaaacgtaaatgattgcatcattcctacagagcaaatctgttgtttgcctaaagtaggccaataatgaaaatagagatgggtatcaatgtatcatcccactaaatacgcgtaccaaaactttccagagatgatagatccaatctgcagaaagcaggtgacgtagagtacatcatgcaaatatatgcaaggaagaatagagcatgaggcttatgatatacaatctaccataaagatgacaattatgtagcaactgataaacaattaaactcagagagaagcacaactatggtgccttaaacatcactcatttcaaacaactgataacgaaacagtcctcttacaacagcttttggttatggagacagaatccaaacatacaaaacacttgagacaaaagcagccattttctgaaatcttagttgatcaatgtaaaagagaagtctttcagaacgtacctacacactctaagagtgctcatgtcaaatccacaatcaagaagtgtgatggatgacttaagaattgtatttcaaagcgacagtcttaaaatagcacaaacgcaatactgtaaaagccaaaaaaaaagattatacaacttaagatttgtctgcgccaaggaaaaagaggttcgattgttgtcaggggcgttcttaacctcaaacttcttcatgtttagatctgaaagcttcatcatcttctttgctccagtaagccaacttaagagtgttgtcacttgcatattgatagtaaggtattggggagtcatctggcggctcttcaacggcagtttcttggttgatgagtgtctcagggtgttctacggcaacaaagaaacctttattttctaaagcttgacgaaatctgaaaaatttggggtcttgttccatctcctccttgttttctgtgagtaccgccaaatttgttggagccttccagttccatgaccagaaaacaagttgggttataatcatgttgaataaggcacgtttatcccctgcaagaaaaaaaaaattacttagttacacaagatacaatagattacttagttatacaagataaattcgagggtttaaatattgagttagagaaggaattgatcacctttgcagagaaagacttgaaatccagaatcccaaagtctgtcttgcgattcagtcaaccatttcgtctcagcaccaccgtaaatcaggatggtcactttgctactccttaaaagagaatgcttgacaatagctgttttgattttctcgtatatcaaaaaaggatcggcactttcagggattgagtagtcctcaatttggctaaattaaaatcttaagattaacgtttatttcttttattgaattactgtatatgatcatatcatatgttattggatctttttccaacgcatttgtagttagtacacatgtgtttatattgttatcaaaccaaaaagttatctatatttgcgctatatccaccgaggttgttaccttcttcgaaaggataaaagaagatcaatctataaatgatgtatatgttataaacgtgctaatataaggattaaacttccggacaaagtaactattgagtattgattagcaatagaaacaaaagtaattgaatattacctgttcagttattttgaatatcacagaaatgatttagcgtatgaggtgatgcatgtatggagatgggataggatgtacacagaaagaggaggtccaagattttcaaataatgtgcatcttcgttggcaggcactcctgagaaacctactctaagaaactgaagagacttggatcacttgagagagacttagatccttagatcctttttgtttagaagtaactttgttatcttcggttagagagatacttttgtttgaaatgagctggaaattgtgttcgagcctctctatatatggtactttttttgctgtggttttcttcagattgctatagagaagcaaaatggattttcccttgtctctcgttcttcaatctagtttctgtgtatcactacaaaacccgttattcaagcaggtaaaatggtctctatatctttgttatccaagcaggtaaaatggtctctatatcttggttctggagagtttgatccaacacagcatatatatccaaaagaaccttagttagttaatcaaggcattatttaatcaagcaaggcattttgtaaaaggacattctcctaagagacggccccattccaggccctgaagttggtataccccttgaagccttgtcaccaagatccaagcttctgtttaaagaactagatgaatacccacgctacgcgtaggtttgttttgaaaattgttaaaaaaattacattgattgttctttatgctaatttatattttctatttgttaatttttgtattgttaataaaattagattcataatagttacaatttttatggttagatttatttgtgactcgaaatatcaatttatatattttgtgtataaagcttattatttataagattttaatattttttcatttcatgaatacatataacaacaataatgatattttgatacaattctgtgtaattatgttacttttgtggtttaaaattttcctaactcgattataaataaatcaattccttattttatgtacttcaacaacattgtgatacactcataattaaagtttgcattaacatcaactgacaaatgtctgaagagtattcgtacaaaaaaataaaaagatagcaaaaattgatcgtcattgaaatcaacacttttagatcttttgccattgcatatatcaatattagagaaatgattgtgtccttgatgatttaaaaattgttcaacttgattataaataaactatttatggttttatttattctccagatataatactccaacaacattgttataggctcatgattaaatatatagaattgatataaaataaataagatttcaagagtattcatatgaaaagaataaaaagaaagcaaaaattaaagtatcattaaagtcaatacttttagatcttctgtcattgcatatatcaatataagagaaatgatcgtgtatcacattatttggtaggtctaatattttgaaggtttattatttgaaaaaacttgaatgtcaaagttatcaaagactcaaaattaaattactaaactaataagaggttaggtagcaaacaactacaacacaaaaaaaaattagtcattgataataaaaaataagaaaataaaaagaatataatgaaagtagtacttaatttgtttacataatttttttttttttttttttactttggagaaatcagttaagagtaggattgattatacatttaatttgcttatttaattttattagttttattaatttaaaaaatatcgaatgacatatgtcattttgttgtgtgatgatgtgtcatttatatggagagagttaaccaactttcatatatatgattcgaagtgatctttccaccaattctactaagctaccgatgctgttctattaaccgactatgaggaccatctacaggtttcgaattctctgaaagatcagacacattattcttccctttcaatggacttcttttcctctctggcgtaggtttccttgatacagaggtcgtttcagccttatgcttttgagctatattcgaagaaggtctcaatgttcgatcaccagaagaactactaaccagtctctccttcttactaacagggactgagactgaatcagactgaaacgaaacactgaggattctcatagtggaaggccataagctttcaggcaaacgactagtagatagcctcctagatgaagctggtaagtctatagacaagtcgcgtatcggcgtggagggactagtcggagatggtggtgttgaaggatgcttcctctctgctgaaactgctctttttgcagccacagattgagagcttgaagacactgttggccttgtgacgcttggggaagggcatcgcccgttttaggttggcgtgggtgatctgtatcttgaactgacctccactgttcgaggacggcgggtggcaacaactgcattgttcctctcggatagaagaagaagacgccgccttgtagtttctgttgctacatccattcaagctaacgaaacaaacttgcattgattgaattcagcagtttttcatgcctctggtttaattcagcgttggagctaaacaataaaaacagctccagttgctgtaaatgaagtccctttattctgcaatatgactgtcttcttcatcatccacatcatcataatcagtactttacaagtccagcaccttgagccattccaataactgactctatggttccatcaaagagatcaaagcttttcgcaacagcaaagacttaaaaaatttgatcttccactaaagtggagaagattgtatggtgggacaaatgatacaaaatccagctgcaggtcattatagtattatgctctaatggcctctgtttcaatattcttaaaatattgaagtatcatgtcaaggctgacaaggcatacggaaaaaggaggaaagaattaatgttctatgaagggactataaaagtagaaacatctttccaataatttgcaccaaatacaaaagtttggatattttccactccaattctcttagtaaggttttgtttcatctttttattcccaggaccatattctgatacgcacaaattccaccaattatatatgctttattcctttgaagtccttttaaaaatattatgttacctcttctaataaatatatattttagaagagaggtaagtcatgaatgtgttggccctaaaattgaaggcatcatattcacgtacaacagaattatattaccaacctagttatagatatatacaaaaatgttacataaatttcatgaaaccttagatgttgatgtacccatttgtaacaaacattatagtctctctagattttaaaacataaactgaaaacccatctataaggaagactaaagaattttattttaaagcaggtcgattaatcaagtcaagatttgtctactacttttactccgtggaaaaaatgcggagcaaattataggttaataactttccaaggtgtccgtttcctctaacttctttatgtttagatgtgaaagcttcaaaactttctctgtgtcagtaagccaacttaagagtgttgtcacttgcctattgatagtaagctattggggaatcatctggctcttcaatggcaatttcttggttattgagtgtctcagggtgtgctaaggcaacaaagaaagctttattttctaaatcttgacgaaaattggggtcttgttccattcttctccttgtttttttagagcatcagcaaatttaatcgactcatcccggttatacaaaccattaattttaccccagtttgtgggggcggataaatataacctacagaggtaattatatgtgtattattaccacttcataatgttttcttttaaatgtcgatcttatatatacaaatctaacaacaaaaaaatagaagcgcaagcggtggaaattggaggtaatgataggcgttgagtaagtacagagaaagatagaaagtaagcatcatatatagcataaatagtgcatgtgattaactaaggatactgcgtttgttttcagattgtgcgttttgtacctctaacttgtttatatttagctctgtaagcttcagaatcttctttgtaccagaacgctagcttttgagggttgtcacttgggtagtaaggtattggggagtcatctggcgggtcttcaacggcagtttcttggttgatgagtgtctcagggtgttctacggcaacaaagaaacctttattttctaaagcttgacgaaatctgaaaaatttggggtcttgttccatctcctccttgttttctgtgagtaccgccaaatttgttggagccttccagttccatacataataaatgacgtctgctaacatcatgtttaatctggcacgtttatccccccctgcaattagtatcatcaatagattacagttacttaccgataaattcatataaagagatagagtgttgatatatgagttagaaaaggacctttgtggagagagactctaaactcggattcccaaagtttaactttggatttagccaaccatgcattctcagcagaaccgaaaatccaggttgtcactaccgccgacgaccttaaattaaattttttgacaatagctgtttcgattttcaagttgatcatatcaggatcgatactttcagggattgagtagtcctcaatggcccatacaactaatgattgtgattcatcacgcactccacatccagctaatgttacgaaaaagatatcaagttagatctaatcaagatcgatcatagacatataaatatactaccaacttcacagaaagatgatatcataaacaaacaattaatttcgagaaatcatcttactggatttcccgatggctggcggcaaagggaagaaactggacatggtttcgacgtagagatttcgttctgggattttattgtaccggtggctgatgagggactttgtgaatttagggattttattatagcggtggctggctgatgagcgactttgtgaatttagggtctgtctgtcaatttggcgggctgtccatgggccaagcgtctttcgcaggtttttgggcccaagcctactaagtgccaggtccagcccattaagatcctatatcaaagatagggcacaattgtagtaaccaccctaatttcacaaagtctctcaataaccatgtgtgctccgcagccctccaacgagtttccgctgatttttcgcaagggtaagatctgtaatcggatctctatatatttaatcgcaataattgtttaatcattgtccgttgggtagatggtaagacatgtgtgttttgggatgtggaggattacccaatcccagctgatctccatcctcgttcgatccggcggagaatcgtaaaggatgtgaagaaatatggttgtgatgcggaggtgtcgattcatgcttatgctaatgataatacggtctcggtaacaatgaggcgtcaattttcggctgctggaatcaaattggaagtgttcacccaaggtgagaattccatttctctgaattaggctcttttctttctcttacagacgttgttgttgttgttgatataataattacctaactttgcagcaggggataaatatgcgagacattgttccttgtatggtgacattatgctgtggtcactggaaaatcctccaccatcaaatattattgtcatcgcaaaaataatcgatgacgacttggctgatcgtattggatgtttgactaccgtctggtcatatgggcttctcatatcccaagttaagccagaatggctagaacggctttttcctgttggaagctatccctcgtttttggcagccatatttgatggaggattgccgaaatcatcgaaagcgaacaaggatcgctttcctctcgatgagtccgacgactaacttttgtgtctatgttattgttttgtgcctatagttgatatcaagtttggattgaaatgtttttagtattgtctatctataatatttatgtgattttggacatcgttactgtgattgagtttttgatttgaatcaatcatgagtgactaagcgcaggtggtggaaattggataggcgttcattgaacaatacagacaaagatacaactagttagcaatcatttatacatagatagtgatgtacaaaggttatgtttatggtccgcttaagactagataggaggtgattgtgaaaccaaaaacaacaaacgcaacgggtaaaaacatgccacaaacgagatagtatattttctgttcattttcttatggtccgcttaagactagatagtccaaagtctcgatatatagttagctctcacggataaatcaaatcaaattaactgatcaatcttcccaggggcttataagaccatcctttgtgccccttgcaaatctatctcaaggatgttctatctacttagatatcaagcctttgtgccccttgcaaatctatctcaaggatgttctatctacttagatatcaagcttttgtgcccctttcaaatctatctcaagggatgttctatctagttagatatacggcttgttgtataatattttcaaatctatctcaagggatgtcctatctagttatatatcaagcttgtgtttattattattgtctatctctagtatttatctggttttggacatctttagtgtggttgagtttttgacttgaatcaatcatgaatgacttgtggttggggcctgaagaagctcaagcggtggaaattggaggttatgataggcgttgagtaaacaatacagagaaagatagaaaaattaagcatcgtatatagcataaatagtgcatgtgattaactaaggatgacttaagaattgtattaattcaaagcgacagagcaatatatatatatatatatatatatatatatatatatatatatatatatatatatgatacaagttgcgatttgtcttactaatttacttctgcgccaaggaaaaagaaattcgatggctgccctggacattctttacctctaacttctttatggttagctctgtaagtttcagaatcttctttgcgccagtaagctaacttaagagcgttgtcaacagttagttgtaaaaaaaagactaaagaggtttcataaagtaagatatgtgaagaccaaaagccagctacctcgttaatcaaatccgtctctacaagcacaagagagtttgcataggactaggagtgaaatagagcaataacttactatctttctacatttgcgttaaccaaagaaacttcccaattctcatggctcatgggattacattccattctcaaagccacttaactccaagtgtcagccctaatataaaaaaaacttcgatcatagtggtatacgaggactagactaatttgtaaccgtgtggagtagtgcttcttttttcatcgtccaatcatagttaaagcatgcccggagaaagggattacctgcaaccaccatgtgtccggtttaaccgcgtagatgaatactagctcactttggccttggaattcctttaagcggtgtctctctccaaaagagagagacttgatcgtcgatctccacaattttgaaacggtgttgaatcgtaagaatgatttcacaggaagtctcacgagtatctcctctattagatcgtgcatgtggtagttttggattctgttcttttttcattggtgaagtagtgattagaaagtttagggtttttattttctttcttatagatcatgcgtgcatgcatgtatgtaactaaaatggaaattctcctttcaatttgggcttcggaccttatgtgtaagattttattttttttcaacttttctaggaagaacaacattatcgtcatcgctacatttagttcatatagttttttcgctatggttgagtaaatggacaaaaacagcttgttattgtcttatgcttccatgatttttttttttgccatgaaactatttagaatgataatctacgattgtaaacctaaaatttttcatttttatgaaatttttacaattttagcaaaaaaacatagatatagagaaatcgtcttaatatatatggctgcagcgaataactaattgtatcaccattttctcttttcttgattaatgttagctaataaaaatagaaacaagtattcaaattaaaagagcttctttttttttttttttgtatcaatcattatgaagaagatgcaagtgactatattggtttcaccagcaccacatcgttgcgtgaatcagtggattgacccattttgcagatgccaaaatatttcaaactcaacattccgataacttggattgtttgtcaagttaaggaaccctagaaccaaaggcttcaaccgcagaattatattaccaaactagtagtagatatatacaaaattacataaacttcacaaatcttagatgttgatctaccctataaaatccgcattacgcaagtaccacgccaaaaacatctaaaactatatcccttcgtaacaaacattctcttgattctaaaacataaaatgaaaaccatgtcaatttctgaggggttagggtttgaggaaacctttggtagtgctaaaaggtgtacacttctttttgtttgtttgttgaatctacaaatctatctgtaaaagatacaaaataaaaacagcaaaatttcccgtgttttcaagaggctaataatctggttagcatcttcgtcctgatgcctatatctatgtcaagatcccttcatgtgtcaacaagacatatatgatcatgaggccatagaaatggctagtggcatctcactttcatgcgaagcgatagtagaattactggaggttgacattcgtttcttcgattgattcccttcaatcgacactagaacttggccttgtgggtgagctattggctctggatcatcatcatcaggagactctaaagattgctcaggagggtcaagatcacgcgtcatggtttctccattcgcgttgttattattaccaccggatccaacaaccatcctaaatccaaaagtacgtgaaacaatgcggtaggcaaatgttaggatccaaaagaaccaagggagacaaacaaagacaatgccgaggtaggagagccaaactggagggtaaggaagaattgtatatgcaattagacaaccgcctccaaccgcgattgataggaaaagaaataaagtaatgagacagatgaacgcctgccccgcccgtggatctggcacaggcattatgattctaaggaaggatcgatctcaaagatgaagaaggatctcacgggacgcttaagggtactactatatcatcctccatttacaaattgctctttttcttcttattcctccaatcttttttctttgtttttgttataatgatgttgataggttgaggatgaatcagatttgaaacaagaataaacagaataaatcccacgcacaataaaagagcgatgaggaaaaacgaaaacacaagagggtatttctgttttgtttttaatttgttttgtttgtgtgtgacttataatttgacaagaatagccaatagtcattttgttttcctccaatatttgccattccatagaagagggacgtccgcagatacaggacctataacattgaatattgttagttcaaaatcatttcaagcttttgcaatcttaattagatagttgatatatgctcatgttagaccaaaataatatttgaaacaacgtatatatgttttaaatgatttttgtcaaagaagatgtaccaatatagagttacatatgattgcattttaatataccaattgtgaatatatatccaattatatatgattggaaaccagtttgatggtatgattttaattttaaacacatgttccaatttcacatactgattttaagtttcaataacttttaaaacagaaattcaaggattctcattccatttctatttgtttgtaaaaggaaacttgaatcattgtttgttgttctattcaacaagtgttttttttgttcattttggtataggtaagcatatattttccctttatatcttgttcaactttttgacaatttttagtttataggaaaagtagatttcatttgtgtaggattataagataaggttgaattgataaatttttatgtttgattaccaaaagtggcaaaagaaaacattagttgactagtgtgacacacaacacacacaaaaaagtaataatatatataatagcagagttttctctcctctaaaagtgtccacgtcactacatctttttaatgtggagcccacatgtttttactcgccttcacattttttctatgcgtgaaatagatttagtgatgtttatggggccacgatttggtcaaaaagcccatgagccaaagaaccaaatagacttagtgatgtgtatcgggccaagatttagtcaaaaaacctatgaaccgaaaggacctaagaaaacccagttaaaattgcaaacccttgatttcattttctcctattcgatcgacgcaattcagaggacgacgaaagagaaaaagagtgtttcagtcactgccctgttgatgcacgaatttcaacaaagtatatttgtaagttctttgataagggaaaaacattctcatcgcgttgaaggtcgggagttaggtcgttcttgcgataaacatagagtttattagttttatagctgcaccttgtaaaaggctgcctacgtacccttagaaaagggatcaagccatacgtagttcatattataataagtgagctaggtcatcgttggaggtaggtcgtatattgagataggcagtttagagatgaggtggcaggttggtgacgagctggcaggtaggcgaagagctggacgaacttagttacgaggcgaactggttgatagacaacgagttagacgaactgagtatttgagtgacgagctggtagccaggggccaagctcgacgaaatgtagtagagagacgagtcggacaaatcgagttgtctggtgaaaatctagacgagctgggagacgagataggcggactgtgtagtcaatggacgaactgacagctaggcgaggagatagatgagttaacttgagggacgagctgctgactaggtgaggaattggacgaactgactagctgacagctaggcgaggagatggtcgttgagtcatgtggagcttgaagacgatctgaagaacttaaagacgagctgtagagcttaaagacgagctgaggagcttgaggaccagctgaggagcttgatgacgagctgtggagcttgaagacgagctgaggaacttgaggacgagctgagtagcttgaggacgagcagaggagcttgagaacgagctaaggagattgaggacgagctgaggagcttgatggcgatctgagtaccttgaggacgagctgaggagctagagaacgagctgaggagcttgaagacgttttaatatggatttcttcctccttttttccatgcctctctatttatagaaaaactaagctcactacataaaaggtataatatggtactttaaccttgatcattgtgacgttggtctccaccatattggcatagcagctaacggaggccagcaatctacatgtatgtcatgctattattatgtagaggaaggactgaagagggaaaaacctatatgagccaacttgaatgggctaaagacaccaccatggctgaaacgtgttggaaacaaatcaaaacttcactaaatgggattagagtggcgagaaaaagattgtacatgatatcacttcgcaacatgaaaccccccgacgtgtgccatccaagagatttggacaacacatgtgagaaatgttttttctacaaacaaatgtttaagtttatttttatggtataacttaaacaaaacatttagagagttggaaactgtttttaaaaaattccctataatgtttgagcagtgaactatcacaaagactcaaaacaaagttattactcttatttcttttgctttaatgtgtgtctttccttgctgttgtaaggaaatttatatttacaataaaatcaaacttttaattaattatctaagcatatcgtactttcaatgttaatattgttataatccaactctttttggctaattcgcgaagagacgttgaaaagtgaaatcttcccaaaaccaaagagtagtttctaagattttaacagagacacaaagagaaaaaacaaatgggcgggttcatattgggccaaaattaacaatggcaacgatgtgtaaaataacttcgtcgttagtctctgttcttcgctatcctctgcagcaaccgcttaatacgagagagagagagagatttccattgtatttttaatttaaaataaaatatataaaaacaagaccaatgtaacaaatgcattgcttagatatatataactctaaaaaatattcttacaagatagtaagtttggtctattgtcctataaattctagcatataactggtaacaatatgaaaaaaaaatgtaaaactatacatagattacaaaaatgtagaaatcaaaaaataagattagcaaataacaaagatattcaccttttaatcaaagatcagtaaaaaaaatcgaagttataattacatactaacaaaaccaaaaacaaaccaccaacgcgcgtgtctcctccctagttaattaaaggcaaaaggaagacgagtaacacgtggcaaatactctatctgtagccgtcataaaaaaaattgtgggaccctacaccctataaatcaagaactactggttgttcgccagcgaattaactaaaatatttaataaacataagaaatgacaagtttagccctctttccataggcataacatggtggctaatttgggaatttcagcagcattcggagtcaaaataacgatagcgcgtgtcggtgaaatcgcggtatacgcgcgtcgatagccgccaggagaatcctttttttacacaatcaaagagagagatcccgtaaatgttttatactctgatttctagggtttgcttttgattctctttcgcgttccagataaataaatccttttgtggaataatttcgtgatttcgtttgtgggttatccgaattttgtctgaatttgagtttttgagaaggaaaggtttgttttttcgggggatggtggaaatgaggaaatctggaggtttaagaccggagtctgaatcggcggccaggtgccgagatgagctaccggtgaaattggagattgctgaagatgatttagaagaagagcatggtcctctcaacaaacgatctagggtttgtttatttctctccttttgtttttttcttctcagatgagctgatctaattcagtttctgcgataattcaatagcaattcttagcatgcagtgatggttttatatttagctggttgtgaattgtttggtgatgtattttttttaattattgattgttgcattgaatttagttatggagtcctgggacaagctcatcgacaatggcaccagctaagtataacccgcttgatgagccgagtcctcttggattgagtcttaagaagagtccatctttgttggagttgattcagatgaagataacgcattgtggtgatcctaaagcagctgaaacgttgaaagctggtgcacttggctctggtcttaagagagaaagtaaaactattgctgctgctgcatcagttggaccgactttggcgccaggaagtattgagaagctgaaagcttctaactttcctgcttcgcttttgaagatcgggcagtgggaggtgagtcctgcgaaatgtttcgttttgatatgttttcatggtggtttcaaaatctgacttgacttggtttctttttttgtgcagtataaatcgaggtatgaaggtgatttggtggcaaagtgttactttgctaaacacaaacttgtttgggaagtgttggaacaaggtcttaagagtaaaatcgagatccagtggtcagatattatggctttgaaggcaaactgtcctgaagacggacctggaactttgactctcgtggtataacattcactcatgttcttttcttttgctcaacatatcactcttgttcaactttaatgatttgactctttatgtttcagcttgctagacagcccttatttttccgggaaacaaacccacagcctagaaagcataccttgtggcaggcgacatcagatttcactgatggccaagccagcatgaacaggtacaggcatttcatgtaaattttttctgaataaatttggtgatgtcctagcttcagctaacgatagtctccctgtgatctgttaggcagcattttctgcaatgtgctcaagggataatgaacaaacattttgaaaagctcgttcaatgtgatcatcgtctgttccatctaagccgacagccggagatagctattgactctccctactttgatgcacggcaatctatttttgaggatccaagtgaatcaaaaggccatccttttgggaatttgaatcttagtacaggtccttcgatctctgggactcagaatttagcatctcctgttggggctcagtcatcatctgagcatatgtatctgtctcatgaagcaccatcacccagctcaggtattatgatgactgctcgctcattctagttgctttcataactcgttattagaatataatttttcattttcacttttgttgaacctgattaggattgtggatttatatttctgtttgtttgcttcgttcatctctagtgatagatgctcgtgcaaatgaaggaattgggggttctgaagcagtcaattcaagaaacagaacagattgtggtcagatcgaagcacctggaatacaccaatctatgtcactgagtgatttccttgcggttctctgtgatacaaaaaacacaacggatttgaatctggctgacgacgtagatggactacaccaatctatgtcagttagtgatttcgttgcatatttatctgattcaagaaacataactgattcagatcagataaaagtacctggactacaccaatctatgtcagtgagcgatttcgttggacttctctctgattctgctggtggaagtcatccggaacatatggagaaatttgagatcatgaaacagcagttgctaagtgataatatccagttcgaggcaccagatgagaagtctctcatgccaagggttaactctttattcaacctcttgtacaaggatcccaacgtcgctgcaaactcacagctcaataccgaaatgtcggttggattgaagtctgaacccaagggaattgtttctgacaacaacaacaacaacaacaacaacaacagagttcttgatacagcttctagcagcaaaccacagggtatgttaaggaaagactcattcagcgatttgctattacacctcccccggatcacatccttgccaaagttcttgtccaacatttcagaagaagatggtgatgcatataatagataatttatagataccgcctttcttttctggatttggcaagtataggaacctggactagtagcttttctgttttttttttcttgtaaatcaaaattatcacttggtaactacaacccccacagggatttgaagaaacatgttttgatgattaatttctgtatattattcccaatataaaccaaagttggcagaggcaaaagattccattatttatcctaaaacttttttattttctcgtaatatttagtaatctttttattacagcattcaaattatagcagagtatgtacaatacaaggagaaaagattaaactaagatcagtgatcatcagctgtacataaagaagaaagatatgaaaataaaagaaagttaaagaagagacaaatgaaacccacaaatcatataaaggggctgtctggttttagattgtgttatttgaattcaaagtatttacattttttgttcttttttggggggagggggtttcttccatcacgtctatctgctgccttaggaacaagcaaaaggatcaggaagcttgttgatgaatagcagtgtcaggaagcattgctattgtcactatgaagtattcacatcctgaagagagaccataagggtttgatgttgttgttgctgaagttgatgttgagattgaacttgatgccagagttctcgagccctggtctgagcagagatgatgtgtcttacccgcctcaggagaagcagaagctgaaagttgtgatggcagtttcactatttggcgctctatgtggacaatctgtccaacaatgtatgtaggccggcttgggagatgatctgtgaacaatgcctcagattcagaggacaagtagtaatttgggcagttcctgttgattgcctcgtaatgccctgcttggtttagcacaaatgctgctatctcatggacttcaagacgaccgaatgatatcttttccttatttgcctgtcatcacaagaattcaccaattttctcattcaaaaccgaggacactccaaattatgaatgtgtagtaaaaggagaaagaaaatttactgcaagaaaccatgactgttactagagataacacgagtctacctgcttcccaagttggtgtttagtgtacaatgttttcaccagctctttcttttcctccaaatcctttcttgtctgttcacttgtggcttcaagattttggcacttctccaataattcctcccggtgtttggagaggaagctaactttgtctgccaggactcggatgcatttccggaactcagtagtaccatcatcttcattttcattaacggagctgtgaaattcccaagtaggagaaatgcaaattcagagaaacattttcagaacaagagcttgaaagtggataagtactgccatatacacaagagaaaaagaactaaggttatctttttgggaagcgtacagatgggaacttacttggctaaagcttgagccaaagttcgcaaggagtcagcaaaatcagcaatcccactaccagcacagacagagctccggaatctttcaaagagacctcgcatcttcacagctgatgcacgaagtgcagtatactgagaagctctacgatcagcagcacaaagatgggtctgggcttcttctcttgcttcatgtaagcagttctccaaatgcgcacaattcatctacaaccaaaatagtaatgtataccacatcagaggtaaaaatttagagggaaaggttcctataatgtgtaaggtgcacaagctatctggtgacgcagaaatagcagaaccatgcttctctagatatttctaattgaaatgtctgccaaatcacaaacattaaactgttcataaccctctcgttagaatgtacaagtaaactaactgagagaaacgaagaaaattcacaattgaatgactggtcaaccaggtgtaatccaagatatcatgaaagccttgatctatggctcctggaactggttggcttcaactggtttaggcattgtgcaaaagcatattgaaccttcctagtccagatgattgacatcactaccagtaaaagatacacagaaaatagacctgatactagcaccttagatactagaatttatgagacgtctaggacacagcaaataccagcaaccaaaagagtaacagaaaatggtgtaaagatagataacacaccaaaaaagaaagactagctcctagactaacgatacaatgaatagattatagagttagaaagataagagaaatctgccaaacctgggattcttcgagaagcttctgattcgtttccaactctctgctcaaattggatacctcttccatagcaccatttagcttggactccatttcactcagtttattggacttttccatcagctcatttctaagttccaagataatatcaccactgtctttggcatctaaacctctgccagttgccacattatcatccaaagatttttgtgggctctcagctgtcgaactgttacttagaaacacacccatttccccagcctcactatcttttccacctttctcgttgttttgctggctttccagcatcgatgagtcaagcggttgactgagcacctgagaggaatccaccatattctcatccataccttcccgagctttacatggctgcttgctagtaagatttgaaacacaagagacctcatccattggttctgaaccagatacatgagttttgttgccttccacgtcacttgaagcttctgctttgtattcactaactttttcatgcataaggtttaagccagatacatccttattattatgtctctgtccctgtagatactcatcagagagacgttgttccagttcacggatgcgcttctcatatgaatcacagtgcatttgtttttccttgagcataagtagaagatgtttctcatactcatctttggcctgcaatgcctctgctgttttatctgcagcatttttcaacacattttctacttcactttcatccagtacctcatattcaaattgtgggcctaatgaacagatccgagagattgcagaagcaaggtcagcttttagttttgcattctcaacttccatcttgctggttccagctatctctattaattcagaggctgctaggatatcatcaaaattgtctttgtcaaaagtgtctatacctatctcctcaggctcagcggaaagcgagctatcaccagacatggtcagtgaactctttaaggatgcaatcttcgaatgtaacccaactagaaactcaggagcatatcgatcaacatctgagatttcaatattgagcaaactagtatcatacggagcaacattgacatcacactgagtaggagtatcgtataaacccattgaagccaacacgtcacgaggtacaaaggggccatgggttttaagaaactcctcacgtttcctgacctctgtttccctcttcatagcaagcttctctgccaattgcccagccatgcccatgtaaagcttcatagaggcttttcttctcaccacctctgcaagacaggccctataagcggggccaacaccacggactaacttcaagtctgcaaataagtcatcctggcgaaccattgcctctctaaaaacgggaaactgtaacttagcatctttgatgatatatgtgacgtatgttatcttttgcatgtaaccgtgtacaaagttgttcatctcattcttcttgttcttgcagaaatccagtaattctgaaattgagttatagcaagcttgcattttgggaaggtgattcttgtcatgcacttcgtacataggacccagggctgaaacagcatcatggggacgcagagatgaggacacttggctagacatacaatcatccacaagtttcttaaccgtattgacatctttgctgtttcaagatttataaaacacagtcagataaacaacataaaatttccaacagagacattataaaaggtgttcccagctaatgaaatgaacaaacctgagagactgcataatgctcttttcctcatcaatgaagcgttcatgatccttaacagtcacttctaagttcttcattgataaagaagccctgcaggcaaacaactcttctaccttgcgcttgacctcgacaaacatctgctggaactgtgcaatcttattctcaaattgcctgtgagagcttgcacaattctccacagcctttttgaggttatcttccttgacaaagtccaacaagcatttccttgactcagtttgaagataagggtgaatcttggctgacctcaatttctcaatatcccttccaaaattcatcagcaaatcagagtggaggcggtgttgatgcttataacgcttcataaattcaagaaagttctgatagatcaccctgtaatactgttccagattcctagtagcaacttcaacagcccgctgctgtaccttttgctctctcgttaacctttcgcagttctcatgcttcacaaccgtacaattgtagatggtgcggcctttatggaaatggtaacgaaattgcctttcatacaaaggtaaagcctttaaagctggatccgatgcatcatccaagggatgatgttcatgtaatgaagccggtggtaaagcatcagcaacgtcttgcaaatctacatcttctggtgatggcggatgagagttactttgcagcatagccttgttgaaaacaaacacttccctgtcacttgcaggaagtccaaaagcagaaagcagcttttgtggctcaagcttcatgtctagcgagagaagaagctgatcagataaggcaataccagaaacagattcaacgaaacgcatcacagattcaactgaagtagtctcgctgcattgaaattcaaacgagtggccattctcagccacacaaagaagaagcttgccatcatcggcgaaactctcagtgaagcttccgctcatcgtaaccaccaaaggacccaaaaatcctcaaccacagaatcaataccccaaagttcacagccaaattaagaaaggtgactcacctaatcaaattaggaaccaaaataggcaaggctgccaaaatcaaaagccctccaacacaaaatcccaaccacgaatctgtaaaagcacagagcttttctatatcctcgatccttgaccaaaatccagattcaccaaaaaccctcgtcgaatctcggagcttttgatatgtttcacagaagacctttaaaccccaagtatccagacctgatcacgaccaggatacacacaaattcagaatccagcgttagctaatgttatcccaaagtacccaccacgaaattttctcaattctcgaaatttaagcgaaattcaccaaatcaaatattcaaccgaatcaatatcccccttctttcgccttcgttgcacccagaagaatttatcctcttttttgctttttttgtttctatttaaaaaggaaaaaaaaaattaagctaaccctagaagacgcaaaagcagacgtgatacgacaaaggaacgcgattgcgtgaagagacgagtgtcaaagtcgaagaatttatccgaagccgcaacaacaaaggatcaaacttctcttcacgaaaacctctttcaccactatacttaaacaattaatatcctcaattttcttcttcttcttcttcctcttccacttcgcttcttccttttttctaataaatttttgacattttcaataatggaaagttgcgcagaagcttctaatgtaagtttactctctcacgcaaacaccagagtcgaagaaccctttcgctcttcttcatctgttgtccaagacaagacaagataaagcctgttttgttataaaaagtaattattttaatttaatatttttatgggggaacggtaattctgtaagtatttcagtttcaccccaatagttttgtaaatggtttaatttacccctaacagatttaaaatttacacaaccggttacatttggttcggtttatttactttggtttttcacaaaaaaaaacacataacgcaaccataaattgtactgtatatggttttgagtaacggtatcaacatgaatttcgaacatgtaaaatcacattggatatacacaaaaataacaacacaaaagaataacaaaattatctttttggttcctaaaaaaatctgaatcttggcgatacggacaaacaaaaaaaagttcaatacaataaaattgtggagccaataaattactttcatttcttttgataccaaaacttataaccaaccttcaaaaccagcataactctactcgttaatcttgttatattcctagatttgaaccatcgtggccatataactgaaagctgaattcattgtgtaagtaacgtatgatatgataatactatatgtgtataaataggtggacacatatatgtatataaactaaatttggcatttcctatcatatgatatgataagcttgattggcatgtgatgtggattggaccacacaaacacacacacacagaagatgtccataggccataggcggtccattattattggtaagaaatgattaaattaagtatgcaaacaacttgacattgaaaatgatcttctgaaagtgatatttcaatgttttcacacaatcttgcccgtaaatggttgcatttaattgttactagatagaaaacggaaaaaaagaacaatttttttttttgtgtttttgtttttaatctctttctaattatgtttttgtgaataactgtgtgtttgattaatatattgttttcgagattcatcatataatatttgttacactctatagatgtgatagagttatctactacaccaataagatataagaaggccacattttgattgtaattgtatatatgaatatctgtggacaaaaaggtaacacttcacataattccaaaggctacgtaacatcagattggttgagcttccacatgggaattcggcaaatctgtaatcttctgtatatgccaaatatgtaattcttagacttaggaaaaaatggtcatctcttcaataataatacttctaattaaatggtcctcactaaaacaatgtttacttaataaaacgtataaacaaatagattttgttacatataaaagtataacctaaaatgcatgcagcaaatttctggattgttagcatatagctcagaacaatcggaaacaagatgtgctgccacctgaaacaaacatactaatatatgattattaagttgacatgacctaaggggaatctcgtgagattcgttttttgacaacttagctttggatccagaatcaaacatagcccacacaaatgaaaataggataacatggattccacaaactcttcacactttttatattatatatagtacttgtgattttataatataaaataaactatatcaatgatattagctagatatttaattcgcgttgaatgtggatactacaagagtttgatagattaaattgattcaagcaaatattttagtgggaatttgtaaaacactacatcttcgttatcgacttgggtatgagactaagagacaatatatatatattctattaaaaaaactcactgttacatgcgataaatggatgaataattcttgcttaattaagtttgagtatattactttgtttgtgacaaccgaaatagtgtcaagaacttcatatcactcggtggattactttatttgattgaatcttagttgataacgaaatcctttctttttctatgtatttcgattattaatgtaatcagaaaattttaagtattttttcacgttatccaactttgagagtactgtccttgtgttggccaataagtggttgaatatatggtaaaagtataaaagctcccatcatgttggacctactagctttgctatatataaaatgtcctgtcattgcataacgtaccactttctgaatctgttttacgtgcctatcaatgatttgtctttaacacttaccgtaatattctacaattaagttcaagtgcctagattttctaaatgtgtataaagacattatatatggcaaatgatcctttagataaccatttcatttaaatcaagcattcgattcgcattcatagataaaatactattcaccggtccagttctaactagccatccagtctggttagaaagcaaaattgtttattttattttaggttcagttttcagatcggttttctaacactgttttggtttggttctcgtatcggttcaaccggattggatagtcataaagaatttgaagtccttaattaagcccaaaacaagtagagcccatatatatactaacaaagccgtgattagggtttttggttttcgtcagaagatttcaaggtttagggtttctgcaattcaaccatggcagagcaggtttggatctacattacattgtctttatgttataattggggattgctagttgttggattctcgttttctgggttctttgattttggcttttaatgatggattggtgtgtttgcagacggagaaggcgtttcttaagcaaccaaaagttttcttaaggtaattgtcacacctcaaaaattcaactgctttgtattttggctatggtctctttatgcttatgattcaaatgttctatcagctcgaagaaatctggtaagggaaagaggcctggtaaaggaggtaatcgtttctggaagaacattggccttggtttcaaaactccaagagaggctattgaaggtactgtttttatgtctcagctctcaattttgctttaccatgtctagaagaagcttcatttgttaaaaaagttggattctttagagaacttagaggattttggtttagtgtctctaatttggttgttgagacattttctgagtaatctgattttagagtaatgccgctttgttagtattctcattgatctaagacttgggtagtagattggtggtatttgcccaattttaggagctttggggaaattgtttgacatagctatgttttttcttgattttatttgcaggaacatacattgaccagaaatgtccctttactggtacggtttcaatcaggggtcgcatcttgtctggaacttgtcacagtgcaaagatgcagaggacgatcattgttcgtagggactatcttcattttgtgaagaagtatcgaaggtaaaaggatcggttttgttattgtgttcaaattctctcagcttatttgaaaccctccagctaaatgcttaatcctaccagatatgagaaaagacactcaaacattcctgctcatgtttccccgtgcttccgtgtcaaagaaggagatcgtgttaccattgggcaatgcaggttaggagcactaatatctatatacttggtttttcgttcaaaggaattcatgctattgtataatactgcctgaactttgataccatctttatttatcacgcaagtttctaaacttatcaagttaacgattcaggccattgtcaaagacggtgaggttcaatgtcctgaaggtcattccggctggaagctcttctatcgggaaaaaagcattcactggaatgtaaaagagattcagatttgttgaaaaggtgcgaactagtattctaagagtttagaatttttctagcagagttattggattcgtttcttaagatctatgatcaaaggaaaccagattttctgtttcatttagtgattcaagtatcaagatatgtctatggttatagttttactccaatatatctagtcatgagttgctatctactagtcatgatttcgatgaaaagtggaattatgcttttgctatcttgatatttatctttgtctaatcgatatttcttgcttccattacattaatttctgaaaatgatatttaagagaaaacaatacagaagttgcataactccagggaatgctatgaacgtgcagcctcattctatgccatacatttatataaaagctccgattgcaccccttaagcttattaagtcatcttcaaaattagaaaaagaggtgcctaagtcatggcgaaaattagtcgaatgaaaacgacacaaaagattcttcatgtataatatacaaaaatatgaccccgtatttcacatggtatagttttttattacatcacttttccaaacgtaaagttaattaaacgttgagaaatgtgatgttgcttggtaacagctcaattctcgaaaacacgtgaaacctggcgcacttgcttctgtttcacatttgcatacaatttcaaccactaacacgcaaccatctccaaacgcagggccacgtttatctgcgtttgcgttaccaaagtcaatgattgacaaacaaacaaactaacactccaaccaatgacgagttttagataaggtattcgtgattttatacaatgcatcaaacagaaatcgaaccaaacacctccttaagttgtttcacggttcgaccaaccgcatcgaacgccaaattaacgagaagaggttgttgttagttgaggaccacgcacgatgggtgaaataaaaaagtccgaatcttttgggttcgttgagtagcttctgacgtcatttcgcacattctaattctaatattcagtctttaaagtcttaaaggatcttcattgtactttgaagtatagtttctgtaacaacaatggccaaaaccagagggtcttgttgtctcgtcaacgctctaatcgctatagcttttttggcgacagcccatttgtgtgaagctggcttgtctcagaaagaacaggacaaggtctcgaaattgcctggtcagaattttaatgttagttttgctcactactctgggtttgttgctactaatgagcaattgggaagagctctcttttactggttatttgaagccgttgaagatgctaagtctaagcctcttgttctctggctcaatggaggtttgttagacaaaatttcaatccctaagatttctccattttataatttcattcaaaatccctctcattttcggattcaactcatatactctgtttcgatcactatgaactactgttaatgttatggatcttcaattttacttttgaggattgtctggtcgattactttagtttggatttgattacttattgcttgtttctgattttgttgttgcttttagcatgataaacgtgatttccgtttttgggttcatgtagatttttatgctgccaatatgttgtttgattcctaaaatggaatcttttttaggatttattcagttcttttcatagtaatgtggtatcgattagtctgcgtctaagatgaaggttcttactttgtctctctataggaccaggatgttcatctgttgcatatggtgaagcagaagagataggaccatttcacattaaggcagatgggaagactctttaccttaatcaatattcttggaaccaaggtaatgaagtaatatgtgctgtgtatgttggcaagagagctatgattcaaaaaaagcttaaaactttcgaacaacttttttgtttgcagctgcaaatattttgttccttgatgcacctgttggagttggttattcatactcaaacacctcgtctgatttgaagagcaatggtgataaaagaactggtaatgatttagctgcttaagctcatgtcttttagatcctcatgtttgctgggtggatttatagtttcagtgttatgaaattcacagccgaagattcactgaaatttctgctgaaatgggttgagcggtttccggaatacaaaggaagggacttttatatagtaggggagagctatgcaggtaaattcaaagctcatctcattttttaatccattcattttgaccataaatactcatgtgtttcttctggtttgttttaggacattacattcctcagctgagtgaagccattgtaaaacataaccaaggttctgacaaaaacagtataaatctgaagggttacatggtgagcctgtcctcttattgatccccctatgattcattttctaaaaggttataaaactctaaaacaatgttgatgaatgtgtggatgcaggtaggaaatgggctgatggacgatttccatgacaggcttggtcttttccaatatatttggtcgttgggttttatatctgaccaaacatacagcttactgcaacttcaatgcggtttcgaatcgtttattcactcctccaaacagtgtaacaagattctggagatagcggacaaagaaataggtaacatagaccaatacagtgtcttcaccccagcttgtgttgccaatgcttcccagtcaaatatgttgctaaagaaaagacctgtaagtggccttaaaacttctcttttcaatgttacactctttagtgtcctaatttctctgtttattttacttagatgactagccgcgtgagcgaacagtatgatccttgtacggagaaacacactacagtttatttcaatcttccagaggttcaaaaagccctccatgtcccaccaggacttgcaccatcaaaatgggatacttgcaggtaaaattgccttgcaatatcttagaaacttggttttggaggaaatgagcctatttaagtattgtaacaattctgatcccgacagctttggttatgcagtgatgtcgtgagtgaacactggaatgactctccttcctcggttctaaacatttaccacgagcttatagctgctgggcttcgtatctgggttttcaggtctctttctctaaatatatccactgaaagcactttaacgatatcttttcttcaagtgttttggcgttttggtggtaaaaagaaaaggttttgttctttggtaacagtggggacgcagatgccgttgtaccagtcacatcaacccggtacagtatcgatgcactaaaccttcgtcctttgagtgcctatggtccttggtacttagatggacaggtacaaaacaaaactcaagatgagaaaatgagaatccttttcttatgttataagaaaaacttataaacagtcatgatttgaaacaggtgggagggtggagtcagcagtatgctggtctgaactttgtgacagtgagaggtgcaggccatgaagttcctttgcacagaccgaagcaagctcttgcgctcttcaaggcttttatatctggaactccattgtccacacatgagaacagcatcagccgcgacatgtctgaactcgttagtgactcataatgagttctgatttgatgtaatgtgtgatttggattctcaatcaaaaactttccacataggccgttgaaataagaagagggaaagagaataaatcagtgttttaagtgatacgttcaatgcttcttcttcttctggttgtttgtttgtttggataaacatttgctgcttggaatctaataaaagaagtttctaccatttgtcagccatacgatccttgaataacaacaacatattcttgtgtaatgagaaagtgaagtctgatctgtgatgtataggactgggtattaatctggtaacggatataatactggggtagaaaatagaatttagactagtattgggggtctaaacgaaattatacagaagcattgggcttgacttggcccatgagacctaagcccatattttaaagaattaggggtttcttcttcctttgtctgttcaaattgaagaaacctgtttttttttttttttttctggaagtgaattgtcttgagttgaacattgaacttcaattggtcggaatctgcaatttctgaggtaaaggtttcatttttaacctttatttgtttgggttaagatgagatctacgacgttttgaatgaggattcggacggttgggtgtttcaggtttgggctcagtgtcttctctcgcgcgtccctcttcaccttcttatttctacctgtgagtctcacttttcttctctccggtctttagcattctattgaatagaagaattggcatatagctattagctattttcctcagatcgtgttttaggcgactttctgttctcgcttgcttaacattgtacttcagtgtcgaattcatatcctacacatgagtctacataaacattgtgctttatgcttgcttccttagttcctcagaaatccttggaaaatccgcagatttatcttcttcgctatctggaattgttttcttcgtaggtttcttctcgttcatgtgtttttccctattgggataatggttttcagctctaaagattctatagccgaaagtaaaaataagacttgtgtaatatttgctgcagctttatttgcgaaatcacgtctaaaaccttgtaggtagaggaaaggacaagaatcccaggcagaagcaaccatggtgatggtgtctaattctacccatcaaaataaggaaatacatgtcagaaggagaatctctgagatgtattcttcgttctgatctttttctctcgttgcatatcatgcttgcctgtgcaaatggtgtgatatttaaaccccttgatcaatctactgcgtattgatcagtatagactcttagcatgtatagcgctaaatttcacatctgatcatttttatagaaaatactttgttcactgcatacacttaatgaagcaattctcccatctatggacccagtgagatgctccattgtttcctagcataccttagcataaaatggagatctttagtcacagtttctaacagatgagatatagatttatattaaggtatcaattttttcattctgtagaagcagagtattttcagcctcttgagtatcatgtttttttttctttctttctggtgatgcagatacaatagacgggaagaggagtttccatcacttaaagactacaatgactacttggaagaagtggagtgcatgggttagtttcacttgtgctccttattttctctattcatgcaagacaagaccaatgtatatattaccttctattccaccagtattcgacttgatagatggaatcaatgtcgaggcgattgagcagaagattaagagatattctaaggagaatgctgaacagataatgattaatagagctcgtaaggtagggcctacgttagccttactttttcttatcttggttagatgaatgagtagaggaaaagaaagaagattaaaagcatgtttggttatatgatatcactgtgcaaattgcttttggtgtatttacaatttgctccaacaggcagaagaattgactgcagccttggcagcttgcaaggccaaacccccacagacagatgctgacacggtaaattgggttttaattttcatatcaacaagcagatgaagtttcctgacgaagctgaaatctctttacttgtttacgcattttgtagtcgtcgaaccatggggtcacggctggaactacatatggtcaggcttcacgaccaacgggaatgggcccacaacctgtacctatagtaggtggagcagagcgtcaacattacgctatggaagacgaagcgacgaggaggatgaaagcagagagagctggaggattttctttagagataagcaagaggagggctttggaagaagcatttgcaagcatttgggtttgatttctcaagcgatattagttttgtcccttatgatagtgactaggaggtcttgatagcttccattgttgtctcagtttactgtcttttactcttgtggctggtttgttttgtatagttgacaagactctattacgggcatcaaggaaaacaaaatttacgaaagaaaaatcgcaaaaaatacatgtacttgttcaattgtagagagacggaaacagatggtagaacagaagcaaaaaataaggaggatggacatagttattgaatttaaagggattttgatgtccatatcaaagacatagtttcatctttagcagttacaccgttcccagttgccataacattttcctctgtttccatacccatcagtatatcaagaaatgattcggcaccgtctaaacaagacatagaacaaaaattcaacttaggaaacttgaggtatatgtaacctcggcaacacaggccacataatttgcaaattaatcgactctggctactgttacgaacaacttccccttttaggtcatcgcaactgaatgtggaaccacactttatgtaagcagaggagtcaaaacacgcatagatggtggatagtggtgcaacatatgttgcaagtgtagaaccatgttgtcgtatctattttttcttcacatatttcgcaccagtagatttcatctgtgctagtgctatcttcatagcaaagagagagaggatgctcatcatatttccagcataactgatatgggatggttgcacatttataacacattgtaaactcacattgagtacattctagtagattagccgacaaacacattctattggaactaatacgtgttccgccactgctgcttctcttcatctcgaacacgatcatatttctctgagtcttagatgatgttcatggcaattttgcgattatttttctccaaatagtattacttttaaaatttcactcccttttttttagtctcaaaataaaagttggtcaaaaaaataaaattaataaacaaaataaaagttggtccgaccgaattgaaccagcaaagccgatatgatctccggtttactgaatatagcaaagcaatcccagtaagaaaataagctctatctcttgctgcagcgattaggctcttcctatatcctctcgttccgcttaatcgtcaacaccagagaagctggaaccttttgttatccggtttaagcaaatgttttggtagctcgctttgatgggttcgttaaggttttccattccattggacccatttgactcaaaaagaaaaaggtttcatttttctgcaaacccttctcagtttcctgaccaatttccaattcactttgttaccagtagtattcacgccactagagcttcctcaatcggttcttcgactagggtgcttgacaaaattcgagtctctagtctcggtactgaagcaaacgagaatgctattaattctgcaagtgcagctcctgtggagagaagccggagttctaaattgagtggtgatcagagagggacaaagaaatatgtagctcggaagttcagtttccgaagaggaagcaatgatcttgagcttgagaatttgtttgtgaacaatggggaaatagatgttaactattccgctattaagcccggtcagagtttggagcattgcaatggaatattgaaacggcttgagagttgcagtgacacgaatgccatcaaattctttgattggatgagatgtaatggtaaattggtaggtaactttgttgcttatagtttgattctcagagttttaggaaggagagaagaatgggaccgagccgaggatctgatcaaggagctgtgtggatttcatgagtttcagaagagttatcaggtcttcaacacggttatatatgcatgtactaaaaagggaaatgtgaaattagcttcaaagtggtttcacatgatgttggagtttggtgttagaccaaatgtggctacaataggtatgctcatgggtctttaccagaagaactggaatgttgaagaagcggaatttgcattttctcatatgagaaaattcgggattgtgtgtgaatctgcttactcctcgatgataacgatttacacgcgtttgagattatatgataaagcagaggaagttatagacttgatgaaacaagatagagtgaggctgaagttagagaattggttagtgatgcttaatgcttatagtcaacaaggaaaaatggagctagctgaatctatattggtttctatggaagctgcggggttttctccgaatatcattgcatacaatactctgataactggttatggtaagatttttaagatggaggctgcacagggtttgttccaccgcctctgtaatattgggctggaaccagatgagacaagttacaggtcaatgattgaaggttggggccgcgctgacaattacgaggaggcaaaacattactatcaagagctgaagcggtgtggttataaacccaattcattcaatctttttactttaatcaatttacaggctaaatatggagacagagatggtgctattaagacaatcgaagatatgactggtatcgggtgccaatattcctcgattcttggcatcattctgcaggcttatgagaaggtggggaagattgatgtggtgccttgcgttctcaaaggttcttttcataatcatatccgtttaaaccagacttctttctcgagtctagtgatggcatatgtcaaacatggtatggttgatgattgcttggggttgttgcgagaaaaaaagtggagagactcagcatttgagtcccacttgtatcatctgttgatttgctcttgcaaagaatctggtcaacttactgatgctgtgaaaatatacaaccataaaatggaatctgatgaagagataaatctgcacattacgtctacaatgattgacatttatactgtgatgggtgagtttagtgaagcggagaagctttatttaaatttgaaatcttctggagttgtgttggacaggattggattcagtattgtggtgcggatgtatgtgaaagccggatccttggaagaagcctgttctgtcctagaaatcatggatgagcagaaagacattgttccggatgtgtacttgttccgcgatatgcttcggatatatcagaagtgtgaccttcaggataaactccagcatctgtactacaggattcgaaagagtgggatccattggaatcaggagatgtacaattgtgttataaactgctgcgcacgtgctcttccgcttgatgaactctcaggaacctttgaggaaatgattcgatatggattcactcctaatactgtcacattcaatgtcctccttgatgtatatggtaaagccaagctcttcaaaaaggttaacgagcttttcttgttggcgaaaagacacggagttgtggatgttatatcctacaacaccattatagctgcctatggaaagaacaaggactatacaaacatgtcatcagcgattaagaatatgcaatttgacgggttttctgtgtcacttgaagcttataatactttgttggatgcatatgggaaagataaacagatggagaaattcagaagcatcttgaaaagaatgaagaagtcgactagtggaccggatcattatacatacaacatcatgatcaatatatatggagagcaaggatggatcgatgaagtcgctgatgttctgaaagaattgaaagaatcgggacttggtcctgacttgtgtagctataacacgctgataaaggcgtatggtataggtggaatggttgaagaagctgttgggttggtgaaggagatgaggggaaggaacataatacctgataaagtaacttacaccaatttggtcacagctttgcgcaggaatgatgaatttcttgaggctattaaatggtctttgtggatgaaacagatgggtatatagaatagctgattttattttcggtggtttattttggtctataatggatgcctcttttgataagaatccaaatgaggcatgcgtgtatattttgaatttggatcagtgataaaaatgttaaatgtataattctcaatgctataaatttctagtgtctttctatcttgaaataattactagaatagaacacaattgtatgtttatttctagaatagaacacatcttttttttattattcacatattttcagtacttgtataattacagttaacacccttgattagttttaattaaatattattattaaattcgtttttaattaaaaaataaataaaaaaacagtgattatccatgtcaccaatccatgtcatttaccctaatccacgtcatccgaaaccaaaaattctcttaaaactttcagtttctcattttttcagcatatctcactgttcatccgcgcaaaaaaaaaaaaaaaaaaaaaaaaattgtcgctctcttctctcgttcattcgacgaaaccctaattttgtcgccgttctttacttatctcgtctctttcggccgaaactctttcgatggtgtcgaatttcaagtcatcaaaaatcaaaacccaaatcaaagagatctatggaattttatatgatttgttacaggtttgagttgaatcaagaataactactcttttactttgattttatatgtctctcgtttagttttcctctcaatcgatctatttagagatatttctacttctatcaatgttttgattcatatggtttcgtcttcctcctatgtatccctcaaacatattcttacgtttcttaatttgattgttgttatttggccaataaatttcatattgtcttccccagaaaaatgttgcttttcgatctgtattataaatcagccgtaaagtgatgtaaatcagccgtaatgtgatgtaactcagccgtaacatataatttacacaatctttcgtcttccctgaatgataactcagccgtgacatgtaatttaccgaacctttcgtcttccctgaagcatataactcagccgtaacatataatttacactcatctttcgtttgcccttgaacatataactcagccgtgacatgtaaatttatagatgtcttcccttaaacatataactcagccgtaatgtaatattaccgaacctttcgtcttccctgtaacatataactcagccgtgacatgtaaattgactgaacgtttcgttctcctttaagcatataactcaaccgtaatgtaattttatcgaacttttcgtctttcttggaacgtataactcagtcgtgacatgtaaattgactgaacctttcgtcttcccttaagcatataactcagccgtgacatgtaaatttgtcgcgaaacaataagagatacaacatctcgtctaactttatcatcgagcaccaacttcacaagtttgtcgtgcgttgttttcgcatctatctgcacaagtttacattctctttcatcagtgttaaatatgtatttgtgtttctatacccaattcccggaaacaacaattaccaaaactagatcaaccatatcgggagaaagatgaaagaaattgaagaaaaatgaggaaaacgatgagaaattataagttccggtgatgtgaaaaactcagtgaagaagacgaatcgaaaaaatttgactctttttttttgtcttttgatgatgctgacatggaatgatgacatggaatattacagccgacgtcgttttgaattgatgaggtggcaactaagccaccaaacgaacattttataactcagccatcaagcaaacctataagtcagtcgcaacatgaatactattacagtaattaaaaaaggaaaaaaaacaaagttaagtcagccgtgtaatgtcgttactcaactaacttagccgtaacgttttaaaactcggccgtaactgcatgctattatagtaattaatcttttgcacataagtcagccgtaacaaggctgagttatttagtaatcgagctctttacggctgatttataacacttgatcataactcagctgtcacatcattccataactaagccgtccaaaactataactcggccgtgtcgaggaaataagtcagccgttttctcataactcagccataacgttgtctgggttatcgtataacttcttataactcggccaacattccttaactcaaccataccgttgcctgagttatactgtaactcaggcaacattttacaactcagccgtaacgtttggctgagttatactcatacttcgccgttttgttatgactcatatatttttgacgtaagtcagccgcaacataccgtaactcagccggctgagttcatttaatccacgtcagcaaattctgacgtggcagtggcattccctgtaattacgttttttccggtaacgtttagtaggggcacgctgggtaataaaaaaaagtcgaaaatataacagtaattaaaaaaagttctgtcgtgttctggtaataacacctaatttcttacccatcacagttaatctcccttctatctttaggaaagtaaagttcattgctctttttttgttcttcaaagaaaagcttactgttattataaacattcatcatcttcattgctctttcactcgtcttccaagttccaacctttctctgatgcgtatacgtacgtgaacgttccttaatagcataactcaaagtctcaaaagttcaaaacgttttgaaaccgaaacaaacctttgaagaagaagaaacattagtactcgtcgtgtagccatataaggtgaataacgaaacttcttcgctaatctcttcaccttcctctacgcgttttactttcactttataaatccaaatctcccttcagaaacctaatcacacaaatcaacctctagttctcgtctttataaattgttaaccaagaaaaacaatctgatcaacagtgagtcttttgtatttctcttcaatagatataatacacacacaaacaaggaatccacaagacgatatttttgctaattgccactcataagacaatctacgtacaattgtgagttttatacaaagatttacaagtttctactttagccaaacagaaacagaacacaatgataatatacactcaaaacaaacaccaaaaatttgcttgtaccattcttttttctttgtctcatagccagaagtaaagcattgcctgtttcagtaaacatgcaaaaatatttgttagtagtaatcaaatactaactaaattttacaagtcaaaaatctgaatgcatatacctcttgaacagaaataatggttgggtcgacccaaggttgtaaattctccattgtattcaagctcttctttacgtcagatgattgcacagaacttagctcttccttcacttccttcagtagactaatctcttcttgcttaatcactccactagtttcaggctctgtgttactctttcctcgctcaagcctctcaactctctgtctcaaccgctgcaattcagcttgatactctgcacggtttctcttaccgcttctatctcttgtctgtttagatggtttcttctccatctttgtctgctttgacacctttatcatcattgtgtcatcagtcgtcttactcaaaccctttgcttccttttttctttcttgtgtaacttcttgaaagtttgatgagcttgcaaaatcttcttcacccctagattcagacactgaagtcctgtgctgatctcgcatcgaatctctaaagcctgttagctctttcacttgctcatttagtttcttgatctgctcccaatacacatctagggaactcttctgtgactccaagctctgctcgataacttccttttcctcgggaatcgaaagatctgtaaccaattctggagaaggtgtttgagatctatcactcaatgaaaaatcattcatcttcaacatattctcatcttgatcatcatcctcttgaagcttaacatctaagcttttcaaatcattaaaccccaagctcaaaagctggcttctataaacttccacttgataagcaagagcagtgacttcaatctctttctggtaaatcacatcctccaaaagcgcaaaggacatttcagcatgagacatttgctcttcgaccattctcttgtactgatcagcttccattgctagctcagctttctctccttgcagcctaagaatcatagacatggcctcgttcgctgacgtttcagatgcttctctctctgcatttaactcttcttgaagcctctcaattacttctttgcgctcataaagagcgattcttagatcatttgtctcagctccaggtattctaaagctccggcttcgttcaaccatgtttctcttgaacagatttatagatacataatgtcagtaactgttacttcatataaaacaagaaaaaaatcgtaaacagtaaagttttcttcaccaaaagatgagcagaatcttaataaaagaagaaagaatctcattgtaccaggaaagttgcagaagaatgattgatgaacttgcagattttgggatgagagtagatgactaatctaatctcttgaacagaggaaatgcttcacgtagaagacatgatgaacatttctggtgaattaacaaaacaatatttagacaatcaaagaggaaactatccaaaaagggaatataatcaatcacaaaaggcacgccagaccaaaaccattatgattatgccaaaatcaaagtggacaaaactacaaaatatatcagatcataaacaggacaaagttgttcaccttttctcagcataatatggaatcaatttgagagttcgtatcagaaattctcattaacaaaaactcctacaggagaacaaaaacgaaaaaagaaagggtctgttatcaaaaagagtaaaaaatcaagtaaaataatgatgatattctggactatcttaagaaaagagctggaacgtattggtgaaataataatctttgaacgattaaagaacttaataagagcttaagttttttgcgtgggacatgtcttcttttttgttttgtggtttgacaagttcttgttaccaaattctaacctcttaaagaattgaaaaagaaaacaaaaagagagattcaagcttttcaacggctcattagagggccaagtattagctccggtgggacctaccgtggccgacttctttttcgccacgtgtcatagttgggtttgaggtttaacttggtgtcggtatacacacactacttatacagcgacagagattcagaagtacaattcaagccaggattgcaaatcttcaagatcacactaactttaagatgaatacaaaactctgtttgtgcagactgtattttaagatcttgttataatgaaacttataaacacattccacaccctcttccttaaacttgtctctcatcatctatcactaccttcctcaatttcttcgttgtagctcgcagaagaaaacatagcataccgtgcacagttccatattatactaaggccttgagaaaactgctattgattcccactccaagctacatatcacatcctgcacatttgtatgtaccagcttgagaaaacacataatgtaagtaactagtttgttgaaacagacttaggtgatgttttcacctgtggattttgcctgtcgatgtcaaaactgttaatggcacaaggttcagccagaagctcgattggttcttcccctgagcaaaatagccaggacaaaaataaatagaggaaacatcaatttggtaactcatacatgaaagaagaacaaatgtggtagaaaggcgtaaataccttgttctatgataccaaggattccatcttcagagcaggtcataacagggagaatccttgaggatgagacgttggattttgtgtatgagtcatactgaacttcccatacctcactttcagacagaggattgtttatattctcacttgctccaaccccagaaagaacaatgggttgctgtggccaccgaagatcccaagcaaatacagtacctgaagaacctcctgcctaaacacacaacagtatcaagatataaagttattaaatcatgcttgtaagttgtggggatacttaaagctacactgaagttttgtgtgcgtatatgtgagcgacaagtaaaatgtaaaggaaaatagtgacaaggtggtttaatattctaaacacagaaacaaaatgattcactttcatctcctaagaaatatgaaggaatattaccaaaggctatatacccaaaaacttggtaaagattgaggatcacactaggaattatcatgttcatcagttgatgggaaagacgtttttcaaacttcaaacagataagaactttaaaagacatctaacacatgcgaagaagaaaaaacacttacaatgcaagtgtgcttccgagatggatgaatgtcaatggagtggacaattgcagaagttttgccttgaaacctgcaatgttataatcagaatagacacagtaggataggcatgcttcttatatagactattaactcaaaggatctaccgttcccattcttagttctacttgctaaacagctcaccaaatcaaatattacgagtgtgttctaaagccaaacgcacaaactttcaagttccatatcatcgaagagcaaacatgccaggaattcaaaaccagattgaactagcatttattcaatcattaaacagagttaagaactcaccagttccctttgagttgtgaaacagcttcaccagacttcctctgatcccacaattgcaaaccaaaaccatatcctccagtaacaaactcagtcggagaagcccatttcacagctctataagccaccaatccattcccatcaaagacctttctataccttaaaccttcaccattcacaatcttcactacattcactctcccatcttcaccaacagtaacacattctcctccctctctccaatccacaccttccacgcgtcccacatgaaacctctccccttccgccgcgtaaaactcttcaatcgcagctccttccaccaaatcaatcatcagaacgtgaagagaaccagaagacgtagctgctgaaaccattggtttgaatgaaccgccaccaccgccgtttcccgcgacttctagagacgaaacgcgagaaggtgaagtccatgaagataacgactcgattaacgggttcgtgttgtgattccctctagggtttgggtcgagcgattggatctcgattgatgaagaatcacaatccgcgtcataggacgctgttgcgaagaaacgattcaaagcagaagcttgtggaagccatctaactccatcgacatacttcgattgtggaatcctatggacttggaacgaatcctgcatcatctccatagctccagaggttttctagggttttagccgagctaaacgagaacaatggtgggaaaaattagaagcttcagaatttcaagttaaattacctaagcaccctcagtctttagctgtattagaaaaaaaaaacattacccttatcaacatgtaaagtctgataatctctcattccgggaaaagtgaaaatgctgaccttacaacacagtagcttcgtctcattctgtcctaacgacaacaaactccgaagctttgctaatggcgtcacgataatgtcgaaaaggagagacttttcagagaaatcaaacgaagaacgacccatcttgcgaatcaaagtccccaacacaatcgtcgctcgatctgcgatcgctgttctgagtttgggattcatcgatgctgggtaagatttttagcactcaaagagcgagaattgcagagttatttaatacttatagtatagtgttcttaaaatctcttcaggtatagtggtgattggtcaagaataggtgtgatctccaaagaaacagaggaattgttgaagattgctgcttttcttgttgttcctctctgtatcttcctcgccctttcattttccaatgattcaactgattagaggttccttgattccttctatatatagctctgctttatctttcagaaagaatcaattagattagatctttgtatcatgaagcttgaacaatacttgtaggaaattgagtttttgtttacttttgaatatcttggatggtacattgcgtcttctatggggacaaacatacattgatacattgaatgaagtattactaaatgttttacaatgtgttttcgagttaaaaggcacaagaaggagaagcccgtcgaaaatccatgataagaagactggcaacactatgagcaagagctcctaagactacaaacacatggaatatctgatggctatgtcctgcaatatcaaaagccccaggcttccatctttcaggtatgcgggtaacataaaacgctgctcctgttgcatacaacacagccatcgcaagttcatatacgagagctataagcacgtttgggtgatccttatgaaggtaaagcacatgtgtggctggtattacgccagaaaatcccattgttaggaacagagctgctctgaaagatctgaaacgtggagctgagagtgatggagagaggagagtgaagatggcgaggagaccgaggattgagatcgatgagaggtagaagagtcgccagtaagtgtggcatgagaatgcatagtagataggtgcgaagaatgaacagacgatcatgagggagattccagcgtagtctagacgccagaagaagaggttgaaccgtctggagtgacaggcgaagaggtgtgacatggaactgcagatcaagcagcccattgctccggtcaagaacacaagccatggccatttcggaatggcttcgtagttaacatctccttgagaattcaggagcgagcgagtgtgtgtcacgtttaagtcctgccagtagacaccaccaaatcataagtttatgttgacaaaaaaacagcctttcttttcttaaacccgttgaaaaaatcatgttagttggaaagttaggtgagcacaaagaaaatctacagaaaactaaagtgagagaaacatcaaatagttggggcaggttacaagatttatgctaaactaaacaaatccaatcataaagtttgttccttaatttcggtaggaaatcacgtgatttcaaagtaggtgagcataaagagcaagtctagagaaactgaagtatccataaaaaccaaagttaaaaacagaaagatagaaaaaatccaaagagaacatgacatggtgggtgaaagttaccatttagcactactgctaattgcaatcagcacacaacaaaaatgggatttgttatttgaaagcacttatgttgcatgtctactacttaaattagaataaacaatgtcacagaataaaaaaggaagaatctttacgtgatgcagagtttgatcgctggagaagtaaacatcttttgacattgccattgacggccatggccagcgaattgttgctctgtcattaggacccacaaatcccccaaaaagattgaaatttgtttaattttcctcaaaacaaaaaatgacgattttgacctcgagatttttcttacccggagagaaggctaacaaagccggcgaggccaagctccgtcgtctccattgaactcacaaccatcatccaagtaaatatcgcaaatccacacaaatgcctgccaaatttcaaaaccccgtttacaaattttcaaccaagggaaaaaaaaatcagaagaaaacgaaaacatacgtccagatgttgagagtctcattgtgccatgagaaagcgctgaggaaagtttctttgattgaccactcacatcgataatgattgtgtatgaactcgttatctttcaaatacctaggtaactcctcgaacttcatcaatctcttctcagatctcttcttttcgccggaatccatacctttaccatttcttatcttcgtagattccttcaccgttctccgtttctgcatgattcccctccctctctcgcacagctcgtcggggggaaaaggaggagaaatctagctacgaaattgaactccggcgaatcacccaccaccgtagatttctctcttcttctttttattttcagtatttgagaatctgatttgttttttttcgatcttcgtggtatgcttcgtcgcctacttatacggagatgaaacctctttgaattttaaaaacgagcaagcttcgtgacttttatctacgtagcgtctttgaccggtcttttttacacgtgtctcttccttattagtatgttagtttcgccttagtgtgagggaggatacacctgattatttttacccgccgtgtcaatttgaaacaaatattaaagttacagttggaaggtgagaaatgcagaatttgtgggtctctgtttaaacctatagtctataattattaaatcgagaactttgtttttacccctcaagatttttttgttgcctgacccttaataacattgttgagtaactaaaacatatattttcgtttcatttatacgtttcctaaatgatttgataatatggggagtgttgatcaaaacagattaaacgaacgaggtaaattgaaagagtaggtaactttttattggctttatggcataagattctccaaggagggttgattcataagacaagacaacacgtacatacatatctatatttaattggtatgaacatggattatgttattgatttatttaaaacgcgtcaaacaattggatataataattaaaaactgaatgaatggttcgcttaccaaagcaaaatatagttggcccagaattcgatgttggcatgttacgactacattgctacattgttatcatcaatgtttcagattatttttaatttgtactttcatagtaattcaccgcaatgaacgatgaggaaccatcgaatcggactaaacgagggtaacaaattttgagtagtaaagtgtagtaacaacaaatgagtgaacaaaaatcgaatggaaccgtacgaatatagtaataatttttgttgttcgcctgctgaatctcaaatgataacctttaggatctttttagcaaatgataatcagtttgtaatctagatttatttggagttcttcattttaaaatcaagataacgtggatccggtttgatccggtctaattcaaatttcataatataaatacaagaatatttcaacattagcctaaaaatacattaaagaaaagagtgtagtattttcaaaagatttgttgtatatcatacaaaatgaatgtatattgttttgtgtataattatatacaaagttgtcgtgaagtgaacatatattctagtttgcttagttggtccgtttttcatctaaatcgattcttagacgccataatttcttgctaagaggattaagtataaactatgtgtacatggatgagtaaattctttggattatttaacgattactcattatctttgtaaagtgtataaagaaaggtgagtattgcgtggtgaactgtggaaacctagactcaaagatcaatactttattagattttgttgctaaatatggtctaacaaagcaatttacgctaggtattttgtttgagtatagtaatcaaatgaaaactgaattatcgaaatttagacaatagacactaacgaaatgaaaaaaaaaaacgaaattaagatgttatacaaactgattaatccatttatctttcactagatgaaatcatagatcatttttcgtgagtctgtaaagatgtatgataaaaaaaagagagtaattaattaaaacatacctagaaagcatataatttgatttaagttgtgacataacgaacctaaaatgacatgtaaacatatccaaaaacgaaaacgaaatatcttgtttataactaacaaaccgaacactgatcaatacgatatactttcaaatcatgatttgattaattttagctatttgttcagttccgttttgggaaccggcattaatcattgcgtgtagcactgttattggtagatatgaatgtgggggattttagttggtaaagaaatttaactagcagaaaaaatgtttgggggcaattaaaacaatatttaaaatacaaggacctttttgtataatattttaggacaaatctcccgccttaaattccctccatattttttcatgtctcttcgcttttcgcctacccaacaaagacaaaacgtaactgtcttcttcttcttactcttccatcttttgtactttcgagtttaggatgttagatctgggaaacatgtctatgtctgcatctgttgctctcacttgttgcccttcttttcttccggcggcttcaggccctgaattagccaaatctatcaattccccggaaaatctagccggagaatgcaatgggaaacatttaccaatgattccaccggaggaagaggtcaaggacattaaaattgctaatggagtcactgcttttacccggaaacagaatccgtctgacagagtcaagaaagggtttgtcttggatgatcatgtgaaggattgggtcaagagaagagtggcttctggtgtttcagagtcgacatgtttccttccttttcttgttggtgccaagaaaatggtatgttgtttgttatgtcaaattaatgacttgtgaagtttttagatttattgacatatagactacatgggatttggattttaggatatacataatatcttgagttatgaagtttgtttgaagtatattgcatctgtgaattgaattcatcacctttttttggctttagtgatgtccgtgtaagatctcatattcatttagatattgtttgactactagtttacttttaaagtcattcgaatcttcaagtcaattagtgactaagttattagatttattgacataatgactatatgggatttggtgtcaggttgattgtcttgtttgccataagccggtgtacccgggggaagacttatcgtgttctgttcgcggctgccaaggcgcttatcactcgctttgtgcgaaagaaagtcttggtttttctaagtcaagcaaatttaaatgccctcaacatgtaagatcctcatttattgtttagaactaaggaagatttctcttcatttttattggctggctttgtattcaatgaagcaaatcatattttgttgctcttatttttggtagaaatgctcagagagacgataggccatcaaataggatatacttaacagttagttctaagtaatagtgtttaggtagggaattgaaatggattattttgattgtgtggtatcattcagtttctgatagaatggagtatgcaggagtgctttgtctgcaagcaaagaacacaatggcggtgtgttaagtgtccaatggctgctcatgataaacattctccatggtcaaaagaaatacttcacttaaaagaccaaccaggaagagcagtttgttggaggcatccaactgattggcggctagacacaaaggttgattttttagtttaccgctttcataagatacttcttgaagcttcttacgatttgtactttcatagagttttactcacaggactgacaaaatctctgttgattgagcagcatgcagttgcacagagtgagattgaggtcagtgtttctttgccacgtgccaaatgtgactgtagtaaaggaaactaattcttacatagacttgccgctcgaaaatcaaaaagagggaagagatttgaaagctggatattttgtttttatcttacacaatttcaagagctaggcactgaatgtttatctactttcttattcaggaagtcttttgccagttgcctttgccatatgtggaagaggagtttaagattgacttagcatggaaagattctgttgtgaaggaagatccgccttcttatgtgcacattagacgcagtatcctttatagtttccacattcaatatttctgccttaaaagtacataattctcattttttcacaacattagtgtgtcttttccttgactgagttaagatatttacctcgttaagaaaaagcgtgataatgctaatgatggtgttgggtgcacaaattgtggccctaattgcgatagaagctgtgtttgcaggtatatttgttaattaaccaaacaaattttctctgttaacattcatttcgttttgaatagtttccgttttgaaaaatttctctcagggttcaatgcataagctgttcaaagggatgcagctgtcctgaaagttgtggaaacagaccattccgcaaagagaaaaagatcaaaattgttaaggtaaaactagtctctagtttatgattcttgcattacactcttcttgtgtttttttatcttgacatgtcatgttattggttttacagactgaacattgcggttggggagttgaggcagcagaatcaatcaacaaagaggacttcattgtcgaatacattggtgaaggtaaactatcttgatttggtctttgagccttatgtttgtggtggaaagcgacagagtttttagtgatttgttttcactctatccacagtgattagtgatgctcaatgtgagcaaaggctttgggatatgaaacacaaaggcatgaaagacttttacatgtgtgagattcaaaaagacttcacgattgatgctaccttcaaagggaacgcctctcggtttctgaaccacagttgcaacccaaactgtgtattggaaaagtggtaaagcatatattatttcatataaatatgtcgatgatgctcgagtaagagagcatgagtcagtttgattattttgttctaacaggcaagttgaaggtgagacccgtgtgggtgtctttgcagctcgtcaaatagaagcaggagagccacttacatatgactacaggtcaagttcttgaccatttgtttcttttatgtgcttataattagcctaagtaatctgagattctgatatattagcttctctctttgtgtaatggcagatttgtgcagtttggtcctgaagtaaagtgcaattgtggttctgaaaactgtcaaggttatcttgggacaaagaggaaagaaccaaactgtttggttgtatcttggggagcaaaacgcagaagattgtttcaccgacctatagcccgtaaaccgcagcaagattagctgcaaaatatctataaacaatgtgctttgatagtttgtctgttgtcgttatctagtaatctctgtggagatatagaaccaatcgtgcttgtaaccgaagcttaggcccacaattgtataactgctagctgaagccacgggatagaccggtcggttataccatacattctttcagttccattacaacacaattattatttaacccttgtcaaatttgaatctgatttaagaaaatacattcccttaaaaaaaactatctaaagatctcgcactatcatggcagaaaattcgacagaacaaattttttgatataaccaaacagaagaaaacaaattatataaagactacaatcatattacaaaatcgctatagcaatctaagtatcaagtttcatcatgtgactggtttcgctctgccttgagctcatcaggtgatcgagtttcagatcacgaccagttgattaagggtcggcctagtcccctttttttgtttttattacagaaaatacaaaagttacagagaatacaaggtcgggttgcagatcacgacgttacggatcatcgtggaatgtgggtagaaagactcataagactccatgaattcgatatgtacctcaatggtgcgaggatcaggtttcgggatacgtctttgttgttgttgaagtttctcgactttgttgtttgatgaaaatatgaaattaatgtattattgatagataagtaaacaacaaaatagtaaaacccaaagatgaaccaagtgacaaattgtgacaactacatggtagctatcctaattatcgaacataaatttttcatcaaaagtctttaacgaaccaagtgaatgacatgtttcaaagtcgaatactaattattgtactggtttaaaagatttgttccaaattgatatgatttaaaccagaagtctccgtatgaaacggagacttactcttcggcaagagaaggttttagtcaaaatccccattttttaaaaattctcaacaaaacgcctaaaaactgaaagtgcttattcctcttctccggcgaaccaaagatcaaacctttgcgagagaatttccctctttttcggcaacgagtatatccaatcagcaaggaattttatgatcgcttgataaattgaaactatttggagtgggtagtgatggatgacgagagacgggtactgtgccctgagaaccgaggtttagcggcttatgtgttgcagaagaagcaagaatacgcagaaaagcccaaaggcttgtcggaaaatctggagaggacatttgttaaggggtataggagtgtctgcgacgccaaggatcccattaacacactcaaagacttgtcgcagatcaagtatgtttcttgctttctttcgctcctcttttctcctatggaatttggttttctactcttcttattgggatatgggttattgggtcattggtttcttgtttgaggtgcccttttttcgcaatggtggaaaaagatgtgacctttttgtgtttctggttcgaaattctcccccttttcagtattgagtgaatggtggaatgaatttagcgactaagaaagtaataagatgctcctcggtatatcaattgtatctttattacctacagttcacatacgtttttggttcccgttaattcaggctttggctaagggtttgtgtttgttttatctgaagttgaagtcatgtagataaaattagacaatatgcgtgtttcttatccttgtgaaatcagtgaatctgatagtgagtggtttctttgtttcaagggcaagtgtttgtttatattcattttagtttcttaagcctttttaaatgcaaagctgatctgattgtgagtggttttaattttttgggtggctttgcttctatccaaccaagtgtctgtttcttgattgcataggggctttggcaagtggatggttaagctcatgaaaggatattttgatactgctgttgaaagttctgagcaagaagatttacctgataatcgtgctggtagtggtgttgggctgttggctgtatctatatcacattgtacacatgtattatcaatgtaatgtctttatgtatgctgatttttaacctgtccagggaaaaaggccaatggaaaaaaacggtacattccgcaaagaaattcagtgggatatgcattactaataacgttgcacaggttagttacatgtttatgttactcacaaaatactctttctttcccctctgtaaacccttcttcagtaccgtttttgttttttcgtgttaccagaaggactacaaatgggaaagaattcatgcgtaaacaagagcttattgatgctgctgacgcgaatgggctatcacacgctcctgttgggtatgaatcaatcgtgatgttcccagtttctaatatattggttttgtacccaacctctgctgtatgtcttattcttccatttcgtgtgagttttgactaggccagagaaagggaaagggaaagcaggacttggacactctaagagggagtggtatagtggatggagctgcatgaccactcttatacagaagggattagtggtgaaatctagcaacccagcaaagtaaaagctcttatctgaaactctgccttatggtgcccttgacttgtattttttgtgaagaagtagaacttatcttgagacttcattgtttcttatcttaggtacatgctgacagttgaaggtcgggaagttgcaaatgagtgtatcctgcgatctggattacctgattcagttgatatcttatctgttgatgaaatggatcctacaccgcaagcaaagaaaacacctaatcaaaatcccacctgttcgtttaccatgagagaagaacttccatatgtcgatccaagatgtagggcacaatcagccattccaagcgatattcttgaaaaggtactccatcataatgttatttggacctttaattcttcttatacggtgttgattggtttaaaattatgggggcgaggtgacatctttttctccagtattaattttttgtttaaaattattggttttcttcaacagtttactccgtttggttattcgaaggaacaagtcgttgctgcattcagagaggtttcagatggatctggggacaaagatccatcaactctctggctctctgtaatgtgccatcttcgtcaagcagaggtttataattcctgtccggactcgagaaatagtaaaaaggattcatcaggaccttttaaatcacaaattcgtacggtctttatgatatactgtgcttagtgctgtgtttgtgaaaagttgcatgtttcatcttatgaagtcttagctacaaatacaggtcaagttgatcttgagggatctcgtgctaagaagttccgctcttgcaatgatggatccaccttaaatccatgttcatcaggttcaagtcatgctgtgaaagcctgctcatcttctgtatgtaaccatttgagttcagtagattattagctatatattataatgatcagtagttgctaatcagctttcattgttctttattgggcgtcctggttatatagttggcatcagatggaaccaaaggaataacaaatattccacgcctccctcctcttcaatttggagaaacgtttgaggaagcatatgatgtgatcttgatactggatgatcgagaaaagtttgccaccaaagggtttgtggaaaattttatcttacgctactcttttatttatttaattattttgaggtttcttatggtttggttatgaaagtgtgatagtagcctagctaccatattgttaatgaacactaatccataccttcttatttcacagatcacgatccaggaatatagttgaaaacatatgctctgaattcaacatcaagattgaggtttgcatttgatttcttggatagatgtcaacagattcggaattacggagaataattggaaaatttgtgttgaatctgtaggttagacgattaccagtcggggattgtatatggattgctcggcataagtaccttgagactgaatatgttctagactttattgctgagaggaagaacgttgatgatatgcgctcatcaattagagataatcgctacagagaccaaaaacttagacttcaggtgtgtgtactctcaactcctaagtttttgacttgctccatcttttgttgatggttgtttcttattgttttcttaaaatgaaaatctaaatagagatcgggattcaagaagctcatatacattcttgaaggggatccaaaccattctgatgcagcagaaagcattaaaacagcgtaagattatctttataacgcaatattttgattggttgtgcatttttcgttgagatttggaaccaaacttgtcatcctttgtatgtgcttctagttgtttcacgacagagattctggagggatttgatgtgctgaggacacacgggctgggtgagacgctaagaaaatacggctacctcacgaaatcaatatatcaatactacaagttacgggtgaatgataatgaccagagcaaaggcgcagcctcatgtccttcttttgatagttttgtcaaaaggtgtcaagaccttgataaaatgacaatcagcgatgtatttgccattcagctaatgcaggtacgagtcctgctaagccttatttggttcttatatgtgaggatccaattcgactgataagttctctgcaacttttccaaaaccttctgttgcaggtcccgcaggtaacggaggaaattgccatagcggttcttgatatgtacccaacgcttttgtctcttgcttctgcctattctcatctagtaagaattattgccttttcctaagatctcgaaatccttgtacttcttctttaggaggaaactgttgaccttctagtctgacttgaactaaaacaatctctgcgctgttttgaaggaagcagatgtctcggcgcaagaagagatgttgagaaatagaagcaacaatgtaatatgtgcatcagctagtaagaatatattcaagttagtttggggtgaatgacttctattctagtgtgtgtccctttgacctttgtctagagagagagagagagatctgaaactgatgaagtgcatatgtataataagccatgtgttgtttttttagattttctgcttgtaactgaagcttaggctcgccaattgtataacttcaatgtttcaatgttttgttttacgttacttcacctaatcttactagacaaaaacgtcgtgacaaattgaactccatgattctatctaatataaactccccaaacaagagggaaaaacaaaaaggtaaaccataaaatttcgaacctcgtccataaactatattgaaactgtactaacttgccggtatattctttttatttattctaagtatcaagaatcatcatgtgactggtttcgctctaccttgagctcatcaggtgatcgggtttcagatcacgaccagttgtttaagggtcggcctagtccccttttttgtttttgttacagaaaaatacaaaagttacagagaatacaaggtcgggttttagatcacgacgtgacggatcatcgtggaatgtgggtagaaagactcataagactccatgagttcgatatgtgcctcaatggtgcgaggatcaggattcgagatacgtttttgttgttgttgaagtttctcgactttgtgagtcggaagatcaggttgttgaagtttctcgactttgtgagtcagaagatcaggactaatgagacgaacacgtgcctcacaagccaaagaacagaacaagatcaaaagaatgatgattgttgctgaagctt

SEQ ID NO: 650 - DNA, 122322 bp, Arabidopsis thaliana
gaattccaactgccatgtcagactaagattccaactttctattcataattgctattatcccaaaatatggacaacaatcttcgaaaacatagtcactcactatccagtaactataaatgataaccgttggaagaatcagtacttgtcataaacggaattaccacaaattctctgtgttctcaagactagtaatctcacctgaataagttgttgtgtggtataataattggtcctttctttaagttcattgattttcgccaacctttcagctcgaagcttttccaaggtcttttgatctctgcggtcaactatacaaccatttttacacagaattagaaacagagaagctacgagaacacaccaacatcttaacatgaaatgagcatataaacacaagactcacacatctttgagaagctgacgattgaggaataagcaagagcagaaacagcaggtaagataaacattggcaagatccggaaactcctcattctccaatccaaatcttccgttctggttgtcaggatcgcataacccacagcaattatctaaaaaggtaacaaatttaccacatcatcgcaatctactaagctcaaacattcaaatttcacaatcaattgtgttgctgacctcgaataatacagaggaaacgatgagatttctggtgagtttcctccatgaaatcgatctacgcttcatccttgataaaacagtagcttcttcccttgagatgtattgaagtctcttctcgaaatcgtcacctctaaccctaaatatcccattccacaaacgcgaaaagaatccattttgcttcttcttcacgctatcggcggttgcggttgcggttgcggccacggcagcggcggaggaatcattcggctcacctttctcaacgaccgctccttcctgctcctgcgccatatcctatcttaccttccaaccaccaccaccacaaactacagaaaccactgcaaaatcaaacaatctattcatcagaacctgaggagacttgagaagccagaaatggtttgactcgggatcagagaatcgcccacttgcctgattctcttgatatgaaattctctagagacggaggatttgaatatctcgaagagaagaacaactggcgatgatgattggcttcttctttctctccgacacttttcttctccttcgagaagccaaaggggaggaattcgagatccaccggtacagccacaccttgacgtcaacgcacgtgatctccacgtgcttctgtattcaaaaacctcgacccattactagcccaccatcttccaactttattgggctttaaattgaatattaacaaacaaaaaattgaatataataaggttgaaaaagattaaattgtatttattaaatacacacccagtgggactcgaacccacaatcgcttgattagaagtcaagcgccttatccattaggccatgggtgctttttgtttactgaatcaaacacaaactatttctcaaagataatacagtcatagtgggcacgtcattattacccgtccgatgagatgggttaaactaggccgtcgtgttataatgtcaagggcgttgtcttcccgcttaaacttggagctcggcaataagctgaagggtttggtgtcggaccaattctacgatgaagcattgagactgtacaagctaaagattcattctttagggaccaatggcttcacagctattcttccttctgtcatcaaagcttgcgcttttcaacaagagcctttcttacttggcgcacagcttcattgcctttgtctcaaagcaggtgcagattgtgatacagttgtttccaattctctcatctctatgtatgcgaaattctcgagaaaatatgctgtacgtaaggtattcgatgaaatgcttcacagagatacagttagctattgttccatcatcaatagttgttgccaggatgggttgttgtatgaagcgatgaagttgattaaggagatgtatttttatggttttattcccaagtccgagctggttgcatctctattggctctctgcactcgcatgggaagcagcagtaaggtagcaagaatgtttcatgctcttgttcttgttgatgagaggatgcaggaatcagttctattatcaacggctttggttgatatgtacttaaagtttgatgatcatgcggcggctttccatgtgtttgatcagatggaggtgaagaatgaggtctcatggactgccatgatctccggttgtgttgcaaatcagaattatgaaatgggcgttgatttgtttcgagcaatgcagagagaaaacttgaggcccaatcgtgtcacactgttgtctgttttacctgcatgtgtagaattgaattatggctcaagtctggtgaaggagattcatggattttcttttcgtcatggatgccatgctgacgagcggttaacagctgcttttatgaccatgtactgcagatgtggtaatgtaagtctctctagggttcttttcgaaacatcaaaagtgagagatgttgtaatgtggagttcaatgattagcggctatgcggagactggagattgctctgaagttatgaatctgttaaatcaaatgagaaaagaaggaattgaagccaactcggttactctattggcaattgtctcagcttgtaccaattcgacattgttgagttttgcatctacagtccattctcaaatcctgaaatgtggcttcatgtcacatatcttattgggaaacgccctcatagatatgtatgcaaagtgtggcagtctttctgcagcgcgtgaagtattttatgaacttactgagaaagatcttgtgtcatggagctcaatgattaacgcatacggtcttcatggacatggttcagaagctttagaaatctttaaagggatgataaaaggtggacatgaagtagatgatatggcgtttcttgcaattttatcggcttgcaaccatgctggcctggtagaagaagctcaaaccatattcacacaagctgggaaataccacatgccagtcacattggagcattatgcttgctatatcaatcttcttggcaggtttgggaagattgacgatgcctttgaggtcacaataaatatgccaatgaaaccaagtgccagaatatggagttctctgctatctgcttgcgagactcatggcaggcttgatgttgcaggaaaaattattgcaaacgagctaatgaaatctgaacccgataatccagccaattatgtattgcttagcaagattcacacagaatctggtaactaccatgctgcagaagaagtaaggagggttatgcaaagacggaaactgaacaaatgctacggattcagtaaaattgaacctgaattacagattgaagattaccaaggaaaatcgtggagtcctatatgaagattctatctaagcactgttctctttctgcatttcaaaagcagcatcactgatgcagaatgttccaacaactcaagtaaggaatagttcgtaaatatttgctgaacttgatttagaagattgttaattttacatggccacagattctaatccatgctttttgttattgcttggacctatctctgagggatgccagtgtgatcatttcacgagtatatgatgtgctctgctttgctacggatccatttctcaaactgatctgagccttttctaagtgatgttttgttgatgtgctactacgctaaatatggatctgaaagagataccataagtgaagcctgcaatttctgaagcctgaaggtaatgtaatgtatttttgtggtttcatcagaaccttgagctcatcagtgctgtttatctctttctttcaggaggatattagcataaactaccatgcagtatctttcttactgatatattcactatcaatataagtgattatgggatttgagcaacttattagagagaaaaccaaaatcactgcaaaactggaatccaaacagctcacagaggcttggtgttgaggctttgccaacggaactgatatactggatgttcaagaaccgacacccagaagtagcaatttggttgatcaaagcatgatggaggaagaagagaaagctgaagaagatgttgatgtgaatatggaagaagcagagaatgatgtcattgtgttggattgattgaggaaactcaaaacaccaagaacagaaaccaaaatataggtgatagttttgatgtagtagatatcatagaatttcatttcaaacatgggatagatagaagtatatgtatttgagaccataagaagacaacccttgtagcctagcacaagtatatgctggcataatgttgtattatatccacaagttgattataagtcctagtatggtttatgtagaagtagaagtatagaaaaagaggcagatcatgtgtgaacgatataggaaaaaatgcatcaaacatgcaacaaagatttaggtgtgaacgccaactcctaatcatttcattcatatccaacatctcataaggaagaacacatgcaaaacagaaacaacaaactgcatgctaaataaaacaagttcaaagacaaggatccaagtatacccttacaagaagcagacaggtaactgatagttaaaccatattaaatgtcactgcaagtgacgttacacatcagattagattgtttatccaatcaatgtccatcatgaggaaactgtccagttgtaagtcttcaactgagaatattgattctgcagttgcatcggttgggagataatattcatcgaccatctctgtaatctcagtagaagcagaaacatcagaggaagcaggaacttcagagggaacctgggttgttgccgggagtgtggtggcatgggaaggtacatgcacaactgatgaagcatagtttgttgctattgtctgtatgtcgagcttggacagaggccggacagaaccttctggaagctgcggctttttatcagtgggaaaattgtaaactcccttctcacccctaatacagaacaaagcagcatcataggctctagctgccttctctggagcatcgtatgaacctagccatattcgtcgtccagtctttggaactctgatttcagacacccatttgccccaagacctctttcggacacccctatagcatttaaatttgcgatcttcatgagctcctttgagtgaagagctaataaaaggagatttaggaggagagggtggcattatatcctaacagaagcaaaattttcagagtagtgttttacagttttatgcacaagtacagggactgtggaaactgaaaagtaagggtattgaaagcagaaagaacttttgtgttgaactatggagcaagtggtgatgaaatggagaggcacgcgatgtttaccaacagcacgtggcaatgtagaaactgcgattgtgccagcgtagtagagtcctcgagagttgcatccgcggggatcgactaataaggtaaaagccaatttatttgtcaagcatacgtttcttaaaggagaggcaccgcaaaaagaaagtaaaaaggagaggaagaacttacgatttatttaaagtcagatgaccgttttttcccccaagttgagacacgcgtacgaaccaccgcagtttctgaagataccattcgatcaatccaaagctagcaaaagttctaatcttgttgtccatatgttaaccagaaaagcaaagcattaagtttgatcgacatcacttgctggaaacatttggaaccggagcttcttgtcgtattcctgtaatccgaggaaccaagcctaacaacattgaaatggaaagaatgaatcaaactggagaaaagggaaagaggggaaagaaaggtaaaatggtctgcagatcttctgatatcagaaacattaactaggatcatatattctcagttacataattatatacttaactgcacaatgcactagaagtctagaacataatcttgtactacagttgtagaatcttctattatcacctagatgaactgcaaagggatcatttgatgatcgtcatacttagcacatgaatctccatcagcaaactggttaaatgtggaaactgcaaagagacaggtactcatctaagtaaatatcaggtagttatggaaatttctctacagagcaaacgcatttaatacaaaacatccagatttgaactcatcagactactgtaattgctacctttctctctttaacgcaatggcttggccttcaattacagcaaatgactaaatgcagcacgcacaagaatatgcttattggaaaatttcgtatacaaactgattggtatgcctcttctaggtgctcgaagaacggaatcctgtgagttactatttggtttcccagctactacgactcttcactaccaaagaggcccaaaagtgggaagaatgtattcagaaactaacaatgtcttaaacccttcttccaaaacccttaagtcacaaatctttacagaacaaaagagaagtaaatagaccaatctcatataaacatcaacaagaagcagacaatgtcacaaaacatccaataaaaccttctatgtagataagatcattatgttcaaaacttaacaagaatgctatagagattgcaaggattttgttctaccaataccaccttccttttagcactccaatcgtttaaaagactcagcttacagaatattaggatctgaaactgtttgcttttcgatctgaagctggaaagcttcagagaattcctttagtaaagactcgtgaactatatcgatcaacctcaaatcatcaaccattccgtgttctccatcttcaagcaagccctttatgtttccaactttccggtctctaatcccacatggaactatccagttgaatggtgttagatctgtagtgacattaagagctaaaccatgatatgttatccatttcgacacacgaatacctatcgccgccactttttggttgcctatatataccatttgcaaacaaaaagaaatcaatctcggaatatatattagatcacttacaaaatcatccatttgaaatatgagacataccaacccaaactccagttaaaccgtcaagacgagaagctttaatggagaaagttgaggaaagcacacggatgacaatctcttcaagcatcctgaggtaccaatgaagatccatctcgtgatttcgaagattgattataggatacataactagctacattttcaaacattcctataatcagcttgaagagctcattagaaaacacacagaaacttccaatgcattgttgacattattacctgaccagggccatggtaagtgacttcgccaccacgttcagttcgataaacattgaaaggagcatcctttatatcgaaattgagataatcctctgtactagcagttcccattgtgtaaacaggagagtgttgtaacaaaatcactgtatcagcgcagtcttggtttctatcaatcaatgtctttttctcctcgacaatgctcttctgccatgaccaagctttcttgtatggaaccaatttgtcgtaaagatcaaaacacaggcacctgcaaaattgatagtgattgcacggaaggtgttcgttaaaatgcctcaaacagaaaatagagagcacaaaaaaggaaactttactttctggggatttcatgattcccggagtttaagatcttgacagatctaactaatctgtttctcttcgcgttagtacgatggtgatgatgaattcccgaaactagagtttctactccattcagcaactccataactctgtactaaagaagaaagtggaatttacttaaaatttatttctgtaaatatacagtcattcaatttttagccaatcaaaaacgacggaaacaacaattttgactctacaaaataatatgtaaatgtaattaattatttgaaaccaaaaaagcaatctttatggataacagatattttacaagcttaatttgaagaagaagataacaaaacaaaaaaaagagcgtggctttatctatcatctggtatccactatccacaactggggtcagcttctggttctctctctcggtaactttctgagctgaagaaccctaattcttatcttcaccggattccgggtatagggctttgtaaagttgttgaatttacaaagaaagatatgctggtttgtctgggttttgtagaagaatctgtgttgttgctttgagattaaagtccgaacaatgttgggtttgattcatgtccttgatgagctcgtcaatggtcttatgccactgcttatcattcagtagtcaaaacccagatcctgaatcatcatcatcttctcttcttcgttataagccttgtgattcgatttcgttgtggggtaagagaaggaagaagctttggagatttgttcccagtgcggagaagaataacagtcatacgggtaataataataagaggagaagaagctggtggcagaggtttttctttgatgatgatgggaattggcttggtttgagagacgacgacattgttgatgagactactgagcttgcaaaggatgatgagatgtctgatgaagagaaattcgagacttggaagagacgagcagaggcgattgtcgagctacgggaaggtcaggaggagattggggatagtggtgttgttgctgatgtgaccaagaaatgggaggattggattgtggattcagatgatagttttgttgagtcttggacccgagactctgctggtagtgacgacaatttagagcttgatgaattgacaattccagatggagggttggttaaaatggtgagggatatggttttaggtgcagaagaggaagatattctttacgaagaccgtatttttcgttacgcttcttcaaaatcggtgagttatgctacatagctctctctgttgatcttgttccttaattgatgatatgtgtgattcttagttcatttgttagtgattgtaatgttcttccagatgattgatcaatgctcattgacgttgtaactctttacaggcaaagtttttggcggtcttaattctcattccatgggcattagactttttggctcatgattatctacttatgcccttcttagacaggtgattttcttcatttttgctgttaattccccaggttatgtctctatttacgttgtgttagtccccagtttgattatttagtctgtgcctttacttaaagatatgtgaagactgtaccacttgctgcccagacgcttgatgtgagacgaaatcagaagctagaaatggttaaggaacttaatagagaaaaagctaggtaccgtcttgaagttgagattggcaaatctccgccgctttctgacgatgatttatggtgggagatgcggggtaaagcgtaagactcgactccacatttttagtttcttttgatgtcaaaggtcgtaaacccatcttgatcgtgtaccagatagtttcttttgatagcctcactgtgtttctttttgtgttcctcccattggtttcttcaacagtttggaactgcgtgatgagtggagactagagaaccggaaagcatttgccaacatatggtctgatatggtgtttgggatctccttgtttgttcttttgtacgccaatcagggtagagtaagtttccgtttccaaccgtgattaagcccacctaaaatggcattctaagtttcctttcaagctgctatgttgttaacatgtacctttttgggttacttcatgaacttttttcaggtagccttgttgaaatttacaggatataaaatcataaacaacatttcagacacgggaaaggcatttctcatcatcctgatcaccgacatattcttggggtaaatgtccaaatctttgctttcattaagagcaaccaccagaactgaagctcataacaaacgttaaatcaaagctgttactgttccaataacctgatattagcgatagatctaccaatagtccattaatgcttctctttataggtaccattctgaatctggatgggagacattgttagagataataatggaacattatggtcttgaagttgagcaatctactattaccatttttatctgcctagttcccgttattatggacgcttgtgttaagctctgggtatcttcttttctccttttttatgctcttttgatttctatgtctctgctttgtttcgtcttctttgctcattatctcgtctgcatttctcaactgtttttttctgcttcttatgtagctgtttaagttccttccaagactgtctccgcgagtttccaacatattccaggagatgaaacgtcactgagtagtacccaccattgaaaccctccacttgagttctgtgtctctatcacacaaaccattcttcagctttatttacgttcagatagacataagagaaacataggctatttttttggtcactcatcttgatcttaaaatatattttttggttgaatttttggtgaacgattgagagagcactaatctgttggctctctcaccagtacttggtcatgtacacaataaacaaacctacaaaagaagccctttcggatatgggctttgggccttggaatttgggctttgggtgtatgtttacttgtgaaatagtagtaatcttctttacggtaagttacaagtctcgtcactttttacttgtgtcttgggttatcttttttgcttttttatggttgatttgatgattaagatttaagagctcaaacttccacacaaagctctctcatgcctttgttgaatgaagacacttttctctcttttggaccaagctctcaatgtcttaaaagctgaccatgcaaataaatgtacaatgttttgattagcaaagacatttactaggttaccctctctctactagacctctaagcggatcagttagattcctttgtagaaaaagttatctacaatgaaaacgaactgtctgcaaatagtgttattaattgatataattgtaattgcccccatttaacatggcggattttacgggccattgcacagttaaaacctcaaataatcatcattttataagcaaaaccaataaattaaactgaatcatcattagtttaactttacaccatttgctaatagttttggtcaaaatctgaagctgacgaagtccaaagcacacagaatcgtgtcagaaattaaaagcatacttgtccaaacaagacaatgtctccttttttgttattgtacttaaaaaaaaaaggaattggaacaagaaattgcaaagtgaaaacgagaccaaattgaaaaaaacagagcaagtggtattaaagataatttaggtaaataagaaggaggaatgtctgacaagacttcccattaaaagccattccttgcagcctttgaccaaatcttagcccttcgttgtgtaactctcttttcaagacacaagcacaataaatatgaacatcatcacctaaagatgaacacaagtttttaaaaacttaacccaaatattttacttgttacatacaacagaatttcattttgaccaaaacaaaaggattttttttgtattacgccatcagaatttaccaaaccatggacgaggccattcaaatattgtgtgacattaccatttctatttgaaaaaaaatctagactggcttctttcttatttatcatcatagactcatagtcatatatattcaatcctaagaatctaaagattaattatgattctataaaaacccctttaataaaacatcaactctaaaaagaaagaagagaggtgtagaagttgtttttttataaaacagctcatatcttcttctttcccccgacaagttcggttcccttcttctctcctcctccaccttctctccattttcttacctctcaacaagtttacacaaacaaaaaaccaaaaaaaaacaaaaaaaaaaacaattttttaaaattcttttcttagacaaagacagagacagagagaggggaagattttgggtttggtgtttttctccttttcttcattgaaagttgtcttcttttttaatcttctttgattaaaatgggtaatgtgacgtcaaatgtggcggccaagttcgcattcttcccgccggagccagcaacatacggcgtaacgaaggatgacgagaccgggaagctggtcttcgccggagtgtcggctgacaagaacgtggaagtccaccaactcaccacaaagtccggcaacaaagttgttgccacgttttggagacacccttttgcgagattcacgcttctctattcccatggcaatgccgctgatcttggccaaatggtcgagctattcatcgaactccgtgctcatctccgcgtcaacatcatgaggtatatcttaaaaactttaatggttagattcttgacgtttgacttgtttttaaatgttttgatggcattttgaaacagttatgattattcaggatatggagcttcaacaggaaaggtaaccaaagagaaatcattcaaaactataaaaccttaatgtgatttattcagatgtttttgtgttcttgactttttttgtttttctggttctttttggtttagccgtctgaattcaacacgtattatgacatagaggcagtgtacagttgcttgcggagcgattatgggatcaagcaagaggagataattctgtacggtcagtctgtaggaagcggtccaacgttgcacatggcttctcggttgaagaggcttagaggagttgttcttcacagcgccattctctctggaatcagagtcttgtatcctgtcaaaatgactctctggttcgatatattcaaagtaagaaaagcacacacaaaagatttgcttttggttgggttacatatatactctgttcctgtctcatctctttgttttgaatgtcttactgcagaacatagacaagattcgccatgtcaactcacaagtccttgtcatacatgtaagtaaaagctttagatctagtggatttgtctgtcttcttctttctgttgatttgtgctgattgatttgtgatgagctgctgcagggcacaaatgacgagattgttgatttgtctcacgggaaacgactgtgggagctggcgaaggagaagtatgatccgttatgggtgaagggaggagggcattgcaacctcgagacttaccctgagtacatcaagcacctcaaaaagttcgtaaatgcaatggagaaactctctctaaccaatccaccacccaaacaactaactaatgagcccagtatcaccgagactaagcacaatcggtgcttgaaattcgggaaacggtagtagcagaatcacaagacaattggtttggtagatttcttccttggcatcgcatgtgcagagttatttcctcaatgtgatcaaaaccaatgctaaacacagggtcacagacaacggcgtaacagagatcatctagtgaggtatttcactgtagaatgttgccctgcttttgggtatttgatcgatgttcaatctcctgtaaaaatgtagcttcaagtttgggggtttctgtaacacatcattacttgtaggagaagcaacacagaaaagatgtaatcagcatttccttcgaactatctagtgctccttagcgagacaattaagtacattaccacaaaatactctcacattataactatacatctgggatcaagagtactaaatcatcctaggttgtctcgtcaggagaatcttgagcccctctgctacaacttaaatcgacatcagagtctatggaagattcacgatgaatgaaggacgaatattcatcatcttctttgggtggcttatagtctttacctctccaaatcacgacctgctccttgtcaaatgtcaccaggatgcaagggaccaaatccttcacacaaacttagatgttagtgtttgttcaaacagaaacctgaagcagtaaagaggtctccaaggcttgaccaacagatgaagttggacagcaaagaaagtgaaagggacaggaagaaacatctcaccctaagctttgctccaattttcttgtaatcctttctctctagtcccaagcaatcaatacgtactaattcactcacgaggaaagcatctctcaccattggaacaagactaccgtaataaccattcttggctgaaacaaaaatttcaggcaaaagtgattaagaatattgacacaaccagaatttaaaaataaaaaggcatggaaaaggtatggaccaagttttgtcaaggcaggaacagctagccctttctttctcattgctttggtctcatcgatgcttagaccatcaattgttgttttaatcagcctagggtacactggttcatgaggtttccacaacatcaatgggatcttaggccttttcttgggatcgtagtttcgccctctatataacacaagtgtaccagagtgtttagagactacctggccaaacgttttgtcctgtaacaacaagcaacacggctgtacaagtcattctttagattccacaaatcatatactaaaagaacaatatcagattcataaaagacgacacctcaaggtggaatataacgttcttcatatcgagggttgggactccaagacatttgacccgaactgcttcagcatgtttccaatgattatagacatcattcagcatattatgagtcaaaccatctcgccctacacatacccccaaagcaaccattcagcatagaaatagcagtatacaaaagaaacaaaagagtgcattcgttattggtgaccaaaaaggaaagttttctaagccctgacaagaagacacacacccttcaaatttctcaatttaaccacatctatcaatgacagtaaggtagactacaatctcatgaataaggagtgaagaaacgaataccaagattgacttgtcttttagttttgttcctctgacacagctccaccagaaatttcctttcagcttcagtgagtgatgccccttgaatcttctctctcactttccttcttttctcttccagcttcggatcctccactccgtcaacagactctacctttggattaaccgccggcgcacagacaccggtccattcccggtccaatcgatcaggaccaaaaggtgaatactttggttctctcaagccaattggcctcacatttgagcaactctctgtgtaactgaaccggaaatcgaacggaagatcagagtgaaccgtcttcacaccttccagcgaagaaggtggacggtactgcggctttggcttcttcttattgttgtttttctggttaaagtcaggattttcggaggctgacgacgacaaaggcggcggtgattgaaaattgtaaaggtctcggagtcgtgacgaggaaattgtttggtcgtgaaggcggcgcgtgagaagtgtaaaagatgatgggttatggcgggagagacgaatcaagaacattttttgcttctacgaagtcgacgaaccagtggagagagactgaagaagaaatcggaaagaggctgaggaaggaacttcttgttgcttgtttcttctctctacttgctctctcaaaacatgggcctaacattatagggcccattagtcaagtcggcctttaagtttgacttatccctgccgtgtcacttatatagtgccttggcgcgctactaactagggccacgtctgcgagaatgagtttgcctaacgaaggagctggcttctctgaaactgctggagtccggccatctacaaccccaacctctcttgttgatatctctgaagatgagcaatccacaaccgctcctgaaactgctgtgctccggcggccatctacaactcctacctctcttgttgatattgagcaatccacaaccgcttttgatacggccgatcaagcaatcacaaagaaagatctctaaaaaaaagtgcatgggaggcttttataaccgaaacctatgttcttgatatgagtgctggagatatctcgatgatggtctagtccagtccagccatctcacctcgattttccacgtcttcagattttactccgtaatttaatggtaagctaagtaagttgatgcaatgttaaattcattctgttcataaatccttaatttttctttgtcaatatatataggaaccttcactccattcgtatgtatttggtgtggagattatcttaaagaggacgaatactgagactttcggtattaagactctttgtctgactgataaccagtcgtttaacctttttctccaatgcttagatatggaaggatatactggttgatcctctttaaaaaagtaattgcttcaagtttatttatacaaaagaaaagctctcggaatttttttgtagtactttcttagtcgatctccacaatttgaggcctcctctctgcagctttcttgcgtataaagataccccatctcaatgcagctttgagcttaagccatcccactacagctttccctgcgcctctacctccttctctcatataacccttgtctatctgagcttcgtactgatcactgaaaccgtaaatggactcatccctgttaccaaacccgcctgatatcccaaatgtcttgagcaatctctgcatgttatccgtctcgagcatctcagaactcctcgctcgaatttcctccgtgaaaatatcttcaaggcctccattatatgagcctgaaactgaagaactctccatcgatgtgtagtctcgtaactgatagcaaggttgttggacaaaaggatactctatcagatgctgaggatctgatgagtagccattcacagtctgttggcattgcagagccttctgctgcgtttgatggttctgagccatttttggctctggcaagctttttattcccttcttagcaactggtaagcaattcaagagcttaccgccatactcaaccactttatgccagttctcgtaagcagtcttcaccaaagtgtctgcagaaatctgttgaattccaaaaaagttcaaaagttttcaccacttttgagtaggatccttagagactgcagactctaaagggaagaataaaaaaaagaagctagctttacagagagatgagttaccttttggtcatggttaagagattccgaagacaagaagtggccattggcaattaggccttgaaattcatatatatgattaaagacaacagctgtctggtgtgtttgatctgtgtaataggcgtaaagtttcccacctaagacacaagtctttgcgtgctctaccgtgttatcccacattctatttgacattccactcccaagtaactgttaaatacacacaaagaaagaacataagcaagaaacaatcattttcttgtgtagatactcacaatattaaagatgcacatacgcttcttagtttctgcggatccttcatgagtatctgtaggaagtcttcaacagtcacaatgttagattttagtagcttcttgtgtagcgctccatctttcgctattttatccaatctccagacttcatcatgtaaaaccggtggataatgtttcttgtatactgcaaaaaacaccgccaaaaaataatccaagattaaggtagacaatccaagaaactctatctctctctgcttatcaagtcagtccaaagttttaagatactcatgttctcctctgtgatctttaacagcaaatggttctgttttagcttcacggatgtgaaatcccgttgcaggcttaacaccaagtctaaactttctgctcctaatccagctcgaattgtcagtgaaagtaagttttccaagagttcctacaccttctttaattatcacatgtctgtcaccagtcaagatgggacgttttccttcgcgttccttcacttcaaagctctcaaaatgttctctcgtccaatctttgtcgtcttcatcattgaagtctccatctaacacgacaatattcagctttgtcattgattcttctcctgtttggattacatttccggtgtttgcatctataagaaccacgtgaatggctgagccttgctctccctcgactttcccacctgtgaataaatgaggaggcattcgtgttctgaaccgaagttgcagatttcttccatcgaggccttgaatcttattcggttctgtagatctgaaaactcaaattgatgtaaagatcatggaaccagtccagaaaatgatatcgtatatagctagataaaataccttgaagtagatttcgagttctccaaccttgatatggcacgttccacctcttcactgacctgtccattgatcgacatcattaccaagtttatcgctcttacaggcttctcaagatttggtctatgtggaagttaaacttcggaatagtatcatactcacaattcttcgaaataatggttccaaagacgagcatagcctctgcagactatctaccttgacagcttccactatgacactgtaagacagtttttttttcatacaacgacgtctgagaaaatttgaggccttgcgaggctaagcaagactatcgaaaatttgaaaagtatgatatttccacagtactatgctctttggacagtgtaactaatgaacaactcaaaacaaggtccgatacaaaaagacttcagaattagccaaaacaatcgaatttacgacacactaacatataaaatatgagttaccttgccaaagcaggaagcttctgtctctttgattctggcaagttgtctgcatgttcttgattgtgtccatgtcctctgttgttcatagaattttccatttaaagtacgataagttatcaacaatctctgtgcctagatagatacgaattaatgcactttccctaagtaggagaaaagagcataagtcctacacaatggaagcttcagagaagaacacagaagaaatagaaaaagagattagttgaatctaggaccaaagtctaaaagctatattttctttatagaactttttgtgcaatccacatggagtggacggtttgcaggagtcactgaaacgagatctgtttcttttagccgtagatcgcttttatagattctgtccctctgaatattagaataaacagagcactttaatggcgaaccctaaaaataaaataaaataaaaatacagctgtttttgtgaatgaaggaatattgaaaatcgaaaccgcgtgatacctggtgagatcataattatgtcaacctaagtgcgtttgactttctactttttgtctcctctctgttcacaaactctcctgtttcttgatgtctgaaaacagtctttattaggtttttaagcaaagaagaaaacagagtccaagtgactttcttgatcctcttgtgctttctgaactcggatttgtttagatgggatattaagctcactctttgtttcagctcttggttattgagaatatgatggtttggggatttcaatgaacatgaaccataaaatacatgacgacttcttatctaacaagagaaggaagtgaagcttcatagtaaagaaatggacaattatatatgaataaaagttgatacaaggcctttctttagctacattccgatcaagggcaaaacaaaaaactacatactgtatatagagaaacgtggaagataggactttgccttgacaactaaacaatttccttttagagctgtgacaattcgatttctcagagagaaacactttaaggtagactgagaagtgcaatcagtttactcaccttcccaacctgattgccgagctctcttctcccacaaagaagtaatcttcctctccttgatcaacaaagcttcagctctctctctagctgattcacaaatctcagtggcggcattgcacttctcagcctccttttgatactgagatgcaacccttttagcttctgcaagggtaacattcatatgacggctatgctcatctgcaactgcttcttgcagcttcagctcctcagtcagaaggtccacaaattgcttctccatctcttgtttaagctctggatcgtcgcttccacaatctgttcacaacacaagacagaattcattttccggtatcaaataccaaatgggaaaccaatcttacaaaataaaagcttctcaataactgtcaaaccatattgcaacatgatagaaaaccaataaaggaaacaacacaagcatagcagctaaaacaaagtcaagctcagaatcgagatctaacctgtaatagagagatttgcgagccctgcaaacaaaacaaaaattcaacttgttaaacaatatacaagtcgagattctttcttactgaaattaaacctaaaagagacagctttgattgaaagatccaatattgaaaaaatcagatgcttcagagcaaagatccaaataaactagagcaaaacgaaattcgaggaaaagggcacctcaaaattatgatcattactcgaaaaggaactaaatttcacaagaaaaacttgtaaaaggatctaatcataaaacgaggaacatgtaagatccaaatcagaataaaggtaaagcataccaggagcaatctggagaagagacaaaggaggaggacaatcacaaacgcaaggaggacaaagagagttggcacgtgtggatccaacgaaacccttgttgaatttccaataaagagcaggtccacacacaactaaagctgatacaaccgcgaaaatcaccagacatctcatgcaatctccggatcgacgaggcatcgcttcggaagaacaaaatgctgaaatcgaacgaatcagagtcggcaatgcagcaacaattgcgattagtgtgtgagcaagcactgtcagcgaaagaaaggaagaattagaaagatacacagctacaagtgttgatgtaccaaacgcggagaaactacaataaaacgaccacgttttgatgagtccccccggttcagatgtcggtggtacatttctcacgtaatcactcttacgattttacacttttgggttccataatctttttcctttccaaaaaggcgctacactttctttttgtttcacacagttcgtttaaatttacaatttgacccttttaattgttttttcctaaatggcactgtatgtactttttcatttgattcagaaattacaccttcctgtatcgaaagagtgtagaataccaaaacaaaagtcctaatttaaaatctgcgtttcttctcaggttaaattaggacttttgttttggtaatctactggctggtcatcgatcttgtgtttcattcaatctagaatttgggtccaaaacaaaagtggacttttgtagattaactagaagcacaatttccactttcgtttcttatgacctttttaattgtatcttgtttgggtttagaatctgatatcttttctcggcaatcatcatctgacaataatcatatccccattcttcacatccatatatgattttaatgatagatgaaacactggtgtgacaacacttgaaccagaagaactctttaagacaagatcatcaatttaatagaaatctctatctttgtcccattttcacaactcaaaaaacttagattctactacaaaacgatgcatcaaaactttagcttataaacacttttaaaaggattctgataaaatatttgcatgtcacaggaaaggactcagattcgccttttctcagacaaattagaggattaactcttcagccatggctgcttacaaagaaaaaaaggagttctcttttttccttatagccccgccatgaaagaagagtgttaccacaatgtctggtttattgacttcttaagaatcatcattgtctcccaataagaagaagaagaagaagaagaagagagcttaaccgaaaaacaaagaagaagaagaagatagagatccaagtaaagtagaatctttaatcgaggaagctcagtagtagtggcagtggtggtgacggaggagatgattggatgattcatcaccactttaaaaagtggttcgtcaagagagatttgaaatcatcggctccgcttccaccggaagaaaaaatcctccgggagcagaacctcatacttaaactaatgatgagagagaccaaatccaatacaaaaccctaaaggtcattccttttttttgggtgaaacttatagaatcaaatttccagttttaccctctgacgattcaactgagactcagaccactcaaagggtatttcggtcattaagcgaagaatacaaaatgtttgtgcgcttcacagcaatggagtaatgaaaccttagatggtctctttgcctttctgcttaactaattttgtgtcaatgacttctcctgatgagttgatagtataagtaacctgtatatggtaaaataaagaagacgttatttcccttttttcttatgtttttcttggtcttgataaacatatcttaacacaagaaagaaactaggggacttacaaactctgagaagctaactctgtgaagaagaaacccatcttccctttctctgacaaaaaaaaatgcatcttctctcagtcattaagattgagctttcatagtttatgattataatgtcatgataagagatcttgttacctcttactattattcgttggaccttggttctcttgttgattaggaaccgtaatgcaagtcaagctctcgttgctgcctccccttgtgcagcctttttcgcttatatataagttcttgtattcatcaaagtttttcctctcagatcaatcatatacttgattcgttccatcaaatttctcggcaatgcaagatattcaatgtcttaccactccatatttggtcatgatttgatgaaatgtccttgccactctcttaggttcctctggttccttagttagagtataggcgagtaacgggtctgatccaaccacaatacgcctgtaatatcaagcacatggcacagattataaggactgattttggagagcagaaagcaaacttggtcaccaaataacgacagagacggtattttatacaagttgatgagagatcaagacaatctatcgctgaaaaaagccaacttaccagtctccgtctactgcttttagaatccttgtcaaccctttcaattgactgatcatataggcattcactgctccaccaagcacttccttcagtttcaattaatcatacataatgaaacaacaaaatcagaagaaaagcctaacaatacatttctatcaaactcacagatacaaactgatcctacctgcttgagtgagccagtgtctacgaaaacaacatccaaggatccaccaaaaggcattttgatgtgctctctgaaatatccagatcctttcattctagtgtacctaatacacaacaaagtgattagtctccttgttacatcaacggaacttaagttaactaaaaggatccattccacaggatcaagataccatggaagtttcagtgaagaagacagtcgagtcgcctgcaaaaagatcaatacactcattactcatgctaactttctgaagtaaagagattcagaacttttttgtcaatccaagtaacccaaaatggaagattacattttgcaggaatggatcttcttctccttgttcacttgagctcacaacaaatttggccttgtaagtttctgcaactttctccatcttcaacgatcaaacagaaacacaaattatgaatcctggggaagctagaaatactataaataaccaaactttaaccatgaaaccaatgaattcgataactagataaattgaaaccaatttttcatgttccaaccaaaacgtaagaagattggaaacaaaccaatcggagaaggcgagtttggtggttaagaggcctgaaaccgccggcaacggagatgaaatgaagatctagaggtgtggcattgtcaccgtcgtcactagagaagaagaatgggtgacccgaatgcagagacacatagatgatgagacatagagataattggatgaagattgtgcaaccccatgacgattgtttcatagaaactctcagagattgaaactcaaaaaggatttgattttttttttgagttcacagaaactcaagaaaacaaatgattggttttaattttaatgttttgtcttcttattttagtggtagtaagagactgcaacattagcttgatgatgatgactagttacccaaatttgtcacgataagtttgcagttgctttcgcttttaaatctctttcgtcgtcatttagataaaatggaataaaaaagattgagaacattcaaattgaaacgtagactcataagtgatttattatctctgattgcttctactatgagattaacaaaatttcatacaagggttacttcaagagcaagcccatctagacaatttcatgctcgtcattctccttttcttgtttgctttattctttgaagccaacctcagtttcctcttggcgtttctctccggatttaccactgccattagcttctcttctcgctttctcttgtctcttttcgttctcaaactgtttcttatttcactgtatacttccacaaacattttgttgcctaaactcttgtcccttatactgtctcgtacctcttctgctagctgtttcaactcatctgataataatcatataatgttttgtcacatttgtgacacagatagccgaatatgcagagggaaaaacatacaaaaacttataatacctgtgacgatttttcccgtatatccttcgcagactttgtacaacggaagcagaattttgtaggcatataagcgacattcttcttgattcaattgtgaggcaaaagatttatagacgttgaacataactctcatctgcatatcacaagcaaatatatatacatatagttactaaaacctgcaaacgctaaggtttaatcagaaaagggaatgacgcaaacctgaacagactccatatcaagagcaatcttccccattcttttgagcaaacttccgatcattacatttcttacatcatcatcaccattctcagtacgtttgcctgaggtaagagccaaaaaagtagacctccctttccctgcatcaagcacttcaaaggctttgaggaataccacttgctcatcctcaccaagactggaccagaaccgattgtgggttgcctgatcaaattgtccaatcagagaatgaagactagagaccgcaaaaacaatatttgctgtgaggagatcaacatcaatgttgcccgtggtgggttgctcctttaactggaagcaaagagaaacagccaccatgaacagactacttggcttctctaggagagaatccgctactaatgtacgacattctggtctttttctcccagctaatgcctcaaaataaagattcaggagcctgcaggatttatttcgcaaccatgcgtgtgggtgcaacaagaacttaaacaccattttccaaatatcctaaaaaacacatcagaaacaaatgaggtccaataagaataaagttctgttaattctttcaacggagaaaaaggaaaaggaaaaaaatcaacattaaatcaaggaaagcaaatgaccggtgcagaaaataaaaaaatccaactaagtccaaggtagtgatagatgctgataaagctagagcagtaatttttctagctggagacctctacttcaagatttgatatcaaaactagagcaatgatcctatattcttgacaacagggcaaaatttagaactatcataagctaatatatatcaaagctgaaagatgcaacaattaacaaggcaagtacttctcagaagtctaccacaacaataaacaacatttagcaactgagtgcatacctctaaatcttttccgaatcttaaatcaggaaattgctctagcatcttttctatcataaccagtgagtagtatgcttccttccagaacggaagactggcttcctcaacagtatcttgcaactgtaagctggaagcactaattgcagactccaaaatagttctagcatcctccactgtattgtagatatgcttccgaaatgttttcttcatggcgctgataaaaaatcccaatacctgcacagcatccaacaaatgaataccagtaagaagcaataaacatactacagaaggtgcctacaagcactatgaacgcaatcaggctttatgaagatggtataagccatacattcataataaaacccttcaggtaacaccacttgttactcctatttcttcatatttagaaatagaggttcctacttcctactgtccgacatctaactattgtcacgaaatgagtttaatgaatatacacccacagcatttacctgtgccgccgcagcacttaagttctgctgcttataccaacacaaacagtacaagagactggaatcaacttgatctttactcatgcggcctatcagaacttctatcacagcaccaaccaagggcagcacttttctatcagtttcattggacaaacagacagtaagttgaataaacaatttttgcgactgctggtcaagaacagactgcttgccaagattaggttctgagaattttaagattagggcatgaagcatgtcaagaactgcttctcttccagttggaaactcatacctgaagaacaaattaacttactataagaaaaagaaaaaaaattgaattcatagctagtgcacaatacatacctcagattttccagcagaaagttcacatgttgctctaaacgtttttcagaaagtgtatagtggaccataaattgcaacagtatatgtttacatttcttgcggattgattccaactgactatttaccatcagctttgaaacctgaattgcaatgtcatatatctctggaactacaagcttccggttcatgatggccttgagaagtgaaagagtaacaaaggatgaatcagactccagatcaataaatatggggaactgaatcaacattttcaactgctcagatgataaagttatatttatatttttgagaagcgttgtaagcagcttaaggcatgactgcacaagaggactgctggaactaactgcagactgagcaatggttaacaatgctgttttcagttcatctgcttcagacgtgagggaaggcagtggaaactttactaatgaagtaaaacatctgagagatgaagatacaatatcctcatacttagaactcaagcatccagcaagcagtttgacaaatggatctaacttcgacagtagctcttcatcagtgttgtcgagtctcaattttttcattcggttataaaataagtccagagcaaacacggttataagatgtggacatgacttcggaccaaaacacaacccagaagtctctttcagatctcttgatttcttcttctttttggagggtggtaaagacacttgatctccaagaccactcctgttattaataccatcatcaactaggccatatataaaaagaaaaagatctccttggtcaacagatgtattgccttcaataccagctgcaatttgttttaacatcttctccagatttgttttgatctttggagttagatgccgctgcagctgagcagtgaccggagaaagtaactttaatccatggcttctgaacgttacattttcagcaatcaatttcagagtctcaaatgacttccgttttcttgtttctttcattttggatgcaaatttttccacctctttctgttcagcaacctctccaaggatatcggtttccaccacagcaaggagatcaaccaaacaatgatctaacttcccacatgtaggattggacaagcactttgataagatagaattgagagtgtaccccagcacatgcacctcagatcctcgttttaagatagcacgtaaaatgttgactacaacttgcaagtactccagcccaagttctttcaaacaagcaaccagagccaatctggcttcatcacgtgtgctctccaaccggttctttaaaaaactggcaattttgtgaactatagatgataggtttgagtccaatacatcttcagggagtagctttagaaccttaagcgcagccacactactgttaacattaacattatcagaatcagaattcatcagcttctgcatcctcgggaacacaattttctgaaggcaagtcctaatttcctcagcctcatgtgggtagccatcttttgcaaaatgaaatttatccaaaatcaagcagataagtcgcagcagaatttttccttttttggtgtgcttgttcatctctcggaaacaccgattcagtaaagcatagtacgatgtccaactcatatgagcagatatagatgcaagggcttctgtgcatgcatttctgacattattatcttttccatcttgtccttcgagtaacatattgaaaaagaccgagaccaaaagttttctcactactccctgcaacaccaacatttggataagtctatcagagtacagcagttgcattgaaaaatatttgaaattcaaggggtcacctcaggcagactgctatctttaaccacactactgaaacgtgaaattgccctagctctacggtgtgcctgcaagatattgaaaggaaattaatcaccgtaaggtttctagcatctgcatgagctacatgccacttcattttatatgctataataaggccttaacaaacctactgaattgagttagagggaaaaagaagaacaaaacaaaatcaaaacttggaacttggattggttcctgtgtggttatgatatagactttattatcaccaccgctcgaatacaaatcatagactcaggaatcatataaaaaaataacttacctgaatgtgaacaatagctttaaaaaaatctacattctcgtcttcagagcatagaggtctgaatgcagaaagatttgcggcatctggaagtttggtcaccatctcgcgtatcaaaagaatccattcctgtgccagaataatatgtttcagataatcgtcagagcaagaagagggccatgaatatccatattacaatatgatgtaaaattcaagtcatgacaatgagctaaccataagcagcatcataaattcgcaagttactaaacctgacctacagctagtatccaataaaattcttatgttctttcttccaggcatatctatgatttagaagagttaatgtacctttattataatgccccctctgtttattgcatctccaatgtgtttcaaaataaaatttctcaaaatgcacagtacacgatctcctgtccagcttacatcagcgtttttgacctcttttccaaattcagagtgagctggagcttctcggcaaagtattgaggctgaaaaatcaataaagaagacaagagcttctgtgcgctaccccttaacataatggattctgatgatacgttgtatatacactgtgagagtataatcatcgtatgctgctctgaggatttaataaagaaatctgcattaatctccacataggcattaactatcttttcatagtcaaggtcatcaacttccatagctgagatggcattcatatcgcggacacgctttgcctacaggttaggaaccaattgtttgttacaattgcaaaatcagaaacaagagaagcaaatgacccagctacaaacagagacatgatacgtaccacatcatccagtgaaaagtcgatttttgcaagagactcaagaagatcacaaatgcataatctaacatcaagttcagcatcaacaagtagaggagagactgtatttataatcttgctggtactctccatcccaagatacgctatgatgtcctgaatggctagcaaagcttcacgacggatatctgtaaaagcaataaaacagtcacatacaagagacctgaagttgtaagttttaccatttagcaataaaagcaatgacaccataccaggatctttaacacttttattcaagaaagacagcaagacatccaaatacttcataacatgggagcgatcttgcatacgctttgacaataatttaagaattttaatctctctttccccatgatacttgactgatttcctggacatacataaataatactttaaggaagtataaaaacaagagcacataacatgagtccgtcaatgaacaagaggtcttaccttttcaaaatatccccaatgaaaagagaatgcaagctgttaatcagtgcttctatatacggatctacgaatccacggatcatattttcatcctcacccaacacattgtcaagacaaagcagattctcaatgaacttcaaggcagaagactttatagcttctgaagccgtggtgacagttagaattgaaaaaatgtctggaacaagggactcttcccgacataagagattcacgagattacggcttttactcattgacaagaagcatgagaacaaggaacttggtttctcactactagaaccctcctgcttgaaactcttaattaacggactcacagctgaaaagaagaggtcccagaactcggagccaagatcacaatcctcgtatttatcaagaacatgagcaatgattttcagacataaggatctcaactctttaaactgcttaaaagcagtgccagcctacagaaaaaccagaaaaaaaaatgtcagacaagacaagaattcgaaagaaggagatgagagaaacaataatggtttgttagataaataacctatatgggacttgtatacaacactaataaccattttacctggtcgtgatttattgaagcattttctttatcatccgaagttgatggggcagcagtgacatttcttagtgccaaagaatcaatgttcatttcttcatcaacatttggagcataatttaccaatagccggacaacacatcccatcataaagtctagaaaaggtcggacacgaagttcatcaaagacttcaaggatatgttggatgacatgaagaaacccaaatttctgatttctggataacgttgaaatagtatcaacagtgaaatatttcagaaaattggagttttggaaatagtcgagagaacttttgcctgaactccaaaatgagtccattgtttcctctgatatgatgttcaaaggttttatcaacaatgcaaagaacaacgcaagttcattaacatccagctgagatataaagcaaagaactgccttccggtgacggatacttgtatgctgacaagaaaaacaaatagaacttgttaggacccaaatgaaaactgtattggcatagtgaagtaaactaaaagtaagtaatatgtaccttccttgaagccgaattttttaatgtcctaacttttggcataaggatgcgaattacaagagaaaaaatataagatctgtgaggttctccgatgttttcggacaagttccaggttgtgagttcttctctcaattcttttggtttgatcaaattcaacaaatgctggcggtgtgggagtaagaagtcattcgccaacagaaggcactctagaacattcgtttggatttcagcatcattatcatccaggaacctggaaaaaacatttaaaaaaaaaaaaaaaacatgcaaaggtcaatgaaattatttaactctgtatcaggaatggaagttcttactccaaaagattcaaaggaacagtaaaatatcgaattgagtagtctcgccaacctattctgcagaatgtcgtttaaaaattgactaaaacaaaacgacctaggattcttcattaattttagcaacgtcaaccattgtacaagaaccgtcttccagtcctctcctttacaaactcggccattatatgatccgacactgcaaggtagagaaaaaaaatgatgataacagttgaataatattacgcttaagaacaacaaacatagagatcagattacctcccaggattttcgctgttgtatcccagaaattttaacaacaaagggagaatttcagaagcccgagactgagcaacacttgaagctttttgtaaggtctgtagcaactgagataccacatcagataccgttgcagtaggcgtgatagcagatggtggaaagagaaacaaattaaaacggccattcagatctgtagattgaaagaataacataatagccatcagactatacgtacaataagatagagatgaggttacagacatatatttcgtctagcatattaaaacaggagcaaaacaatgaaaattgatatttgaaatttccagaacgaaccaactagttcattatatgagtggatgaaataggtacttacttaaattacatgcatgcctctctgacatactttggttcgcattctcactatgatcatggagggtttcaaattttagttggcactgccccaaataacaaacaaaatcactccacactgcaccagtatatttcctcacaagaaccgcaagacactcagatgcttgaacacacaaaggacgataactaatatgtaatatccccaacatcccattcaatacaagcttcacatatgccgaatgtatcctgccagcggagaggttatcttgtattgtagaaatgtatcctgccaacatccgactagtatccactgtgggagcagtctcttcgaataagagtaataactgaagaacctggtattttgaaggaaaagtttaagaatgtagtgacaacatgatagagcacagaggcaacagttatatagtcatcatgctagtaagaaatctacttaaggtaagaatacagaacaaaggatatctactcacattcttctcagttttcattttcttcttaggaggatgctcttcaaaagaagggtcagacgacaaagtttcaaaatggcacaaaatcctcagagtcataagacggatatttttgttcggatgacgcaaattttcagaaaatatttcaaaagcatctccagccttatttgcttgaagttctggataaggcttagacctaccatgagctaatgcaggcctacgattcaaaatagggaaatgaatcagcctacagtcacagaatcaccaaacatggagaaataactgaatagccaccaaaacagacaaactcacctgtgcataaattccaaaacatcggccaccggggacaacacttgctcacatgacttgtaatctttagcaaaagacaaagcttcctctagatcactgtggttgattcccgtcattttgtaacatgacctcaaagtagtaccaagtaagctctgccacatcaattctgggccactgcaagtgtctactgaaaagaaattcgcttgtataagatgttacacggcaaagatagggtaagctgaaaagaaattcgcttgtatatgagaactatttggattgtgtatagctaaaggcccagaccatgaatcttcatctgtttgaatttactgatcgagcacataatttgagtggcgtcttaagaggaaaaacagcataaaatgaaaataaactaacatgcaaaaaagagtgaatcatgagttgatacttaccatctgacactgccaaatgctgtctgagagttttcttaaagcaaatcaataatgatgaatccactttaaaataaggataacacttgacaactccccaaattgcagccaactcggcctcattaatttgagctaatccagcattctcaatattctgttgaacctttttaatctttgcttccaagaactcatgaattctctcgtatctactctcaaatgtttgacttatgctgttcacgacgtcgtgacttgtttgttgtgtcttatgctcttcacacaatgttagtaacagaggaataacttcctcagaagactcccaaatcatgttgttaattgcactgcaaaacagaatttagtttactaagacagagaggtaggagaatcaaagaggagttgatgaaaaagactatgacatgagtcttaccataatatattctttgtaaaggctttcactactgattgatctttctttaggaactcccgcaaaaaagtcagcaaactgaaaataaacatgatcaatgtcaagaaaaagacagaaaaaaagaaggtttagaagtataaacagatagatagtagagaataccttgaactcttcaaggcaaaaatgggagcccaaagcgaagcaacagtttccatttcattgaccgtgttgattgtgcataatatcaattccaaaacttcatcaaggacagcagataagttatccccttctacagcggtctcagaggaagtgaaaaaagttgacacaatgcggctcacgattccaatcagtgatgggatatctgttacacagtgacagtaacttaagttggcaagacataataatgttgaattatgtatgttgctatgtgtagcccaaagagactacagtagaacgagagggtgagggagaggagcaaagcggcaattgaatcactcaccgtgaaccttgcgaccttccttaatcttaacaaccgccataagcacactcaacagccggcttagatgaactgatttcttgtttgagattgatttgtttattttcttatacaagtattcccacatagcacttaatttttctgcttccaaatcctcgcatattctctgcaaaaccaaactcacaacttccacgactgtacaagggcctgcaatgcaatagaagattcaaccatgataagaaggaaaggagattcaaattgtgaaaaccaggttcagggtatcttatcaagttatttgatataaatgattaacatcctctacgaagtagaagcattaatcccctccagcaagaaaatgaaagcagtttaataaggattctcacctcccaccaatatattagcatcattaaaccaaccacactagccttaaattcatcacggaagaccttaatataaatgatatgcaaagataagaaaactctatgatactactcattctcctctacactaagaattaaaatcaagatgaggataaatcaaccacactagcgttctaaataaagtacacttctaaatgaaatactaaaacatctctttagaaagatagaacttgccttgaggaaaattgtccaaaaaagataatgttgaatctttcagcaagaagctcaaaactctcccggcttttgaatggagtcttccataggtacccctcataacattatatagtactccaactcctccagcttttttggatggatgtgcaacttcagaaaggatcatcttcatacctgtaatttttaggttagaagaatcaactagactgtgtatcaaggggactatccataacgtaaacatggaaaaacaaatgaccagcaatttatcacctttttcaagttgctcatcctgtgctttcctcaacaaaaatgacatggactctgacataaattcactgatattgtctttggggtagtacctcaattccaacgtatcccttcagcatagcaaattaaattaaatcaaaaatcaaatctacgagatgaagaaaaccctataattagctttaacaacatttacagcatgtgatatccatgtattgtcttttaaggatgatacagacaattttgtcaattttagggcagcctctattgatccagtaagtaaaagaaagaccatgtgcaatcatcagaaccatcacaataaacagacattgtagattagattgaatttctttacttcacttacctgagaatgccttcgatgtcgcacacaagatacttctgcagggacactattatggaagcccatgatgtgaatacctgcacgaaaaagaaccaaaattcagcaaaaaaaacatatgaaatttaggtagtggcatgagcgtaaaatatgctatagaataccaacaacctgctgaataatctccggatcgttatgcgcaccattatttaggagagtcacgaaggagttcacaatttgtggcaagaagctagccaagaaaaataaaaaagataatggttagaaaatttaatcacacggacaagattttatcaaagaaatcgcaagtgaagcttgaacacttgacccttagaagaaggtaaaaaaatatgccaaatatcagtcaaacacaaaaattacttcctagtggtctagcactgtcatgtataatgtgagaagacagtactcaaaattcgagttagcaactcttttctggccactgtatgcaaggaacggaaggtaaactttgtgttaaagtgtagtaagctattcagtatagctcaaactatatcagttatcagatggcaaggaaaacggtttaaaaaactagatagtccaaagctgtacgacattaaagagtactctgtaggcaccttaaaacaattcatcagcttttttaaagcatttacttccagtaagccttactaatgactactaggttttcaaagtatactagctcacaataaggagtttaagaatactcacggaataaagtcattcaagagatctcttgatagagcagcaatcaacctgcaaaaaaaaaatctttatacttttataccgaagaagattacaaaagtgcgagcatgcatgctcttatgaatagaaaaagtgaagaattttagcgaacattatcttagctcctctgacaacattattctttatcatagatgtcagaaaaagcaaatatttccatggaattagaacgtgatttcgaagtgatggggttaactacaacacttgaaagtgaaaattcggcggcatacatataaaatgacaactgaagtgacaagtctatataagtgaaaaatacgttccactggcagatggtttcaggctaaaagaacgagtggaaattagcaaacctgagaatgggttccagagacaatcttgctttcatttgtaatcgagagacaagatttgagaagattctttctttttgcataataatcaaactcaaactctggacagatggcaacatctcttcataaaacaaaatgaaatcttctgcggtattcagttcctgcactcaaccaatcaaatgaaccaaatttattatctcactacgtctgtgtaagcgtgatcgagcaccaggaagacttagatatatacaaagaaaaagtaggaacagccctgctagtatatcatatgcaatgcagccgctgcatcagacaacaacaatatattcagagagaatgcttctctggtccctatagaacaaactaacgagaagagagagtaccaacattcttttcagtgcagaggtgaactagcgaattggcaatctctttacaatatcatgtgaacaatacaagccataaggttgggtttcaagttcacacgatcactaaacattgccattccttctcatgtttcaaccaccgcaacttctagccggtaataacgcaaaactaaaaccaagcacggtttactaaagactacaatgatttactgaagattcttaatcttaggttacaacagtccaagaccagaagaaaatattgaaactttaaaaaagaggtccaaggcaacaaaatcaaacataccctccattctatgaggcaatccctgaaaaatgtggatccttctgaaggctcagccttcaccttatccaagttcctatagttgctgatgttgtcaatgtcatttgttcgttgagaagcagacttgaactgcatccagaaataataaagcacaaacagccatattagagagcacaacgaaaacagataagtgagcttactaatgaggagaaacagtggactctatgataggtgtagaggaagttttacaaaggaaaggaaaagacatgtgctatataattaaacaaacacgtaccacaaatctcttacgcccctcggaagtgttgagcgactttactgcccgagcatcagctgatgtcgccatgattcagagagccgtgtttcctaaacacatcaatctccaaaacagtcaatttcgattccaaaatccccaaactttacaattaaatccaggctaaaaaaaaaaaaagagaagcttctaagagcaactatgtatatcaatctaattgcttaattgcttaattgctaaagccttggaaattaaacaacaaaagtagagcttacgtttggaaacgaaatcacacagagggttgcgaaagcaaaattgcgtctttaaagagaaaaatcgaaaaggcttgagcttgagaattgagattgagcttgagcttgagaacgcggcggaggaagaaagggtttaagcttcttttttgttctcaaacaaggaggcggttgggtttaacgacccggttaggttttatcctggtttatcgtttaatcgaaccgaatgttcgggttttgacgtatatttctggttttccataaccgagatccataattttagacatttttatttccctttttagcccaatcttaacattcgaaaatcgtaacactggccaacaaaatattgagacgcgcgttaactcatcaacatcttcttctctcaaattaaaatagcatttcgagcacgtccagcactcagcttcatctacaatcacagcaagccaaattaagctttcatgtttctcaagtagagtttttttagtataatttaagagaatgaaattacatttaaggaaataagatatgtttatttatttgtattagactaatagagtaagaaccaagactttaatcagagtttgtcagattcatacaaggttaaataattcaatattttcccaaggcctagttaagcccaccttttgatatttacagattatatttatagttcattataggtgaataagtagaacttgggaaatcagacgtgattgtgtaccaaactaagatcgtaagagccagtttttcaatttgaacaaagccgtaatttttgagggagttcctcaaatttattgggttttgtcaggattgagtctacaatggttgtgcaccatatggtttattttcctgccttcctattgtaaacgtattgttttatataaacaatagaaaaaactactgataatatgaaataaaactaatgtatcagtatactagatgggaccaatagtttatttaacatagtagcatttttgtctttactatctgtttattttttctatatggaatttaaattatcattcgtaacttattttacacccccttagttaattattttggtatacattatgattattaagtaaaaacaaaaataattattgcattctcttgataatactaatacatgagatgatagatctctctttctgttgtgtagtacatcaatgcttaccaacatttgtaattaataaatgggaagtgtattaaagccgatctctacctcttgtgagtttgtgcaaaactcagaatgtcccatgtgcttaatcatgcatattgcataataatgttctttacttatctttgtcaatttaatattaatcttaatcaaatactatcaaacagctgaaaaactgtatacgatggtaaaaaagaatttttaaggtaaatgatgaatttattagaccaaaaaatatttaacaagtataaaaaatacatggtaacatgacatgatgatgatgacgatgttctgttatgttatgttctcgtttgagaggatcctctttcccaaatgttaatcagatcggttaaaacaacaatttcatcgatcggtatcatattaatcagaaaacaaaacaagaataatctataaaaagtgatcttattcttatcgaacacgagtatcgtctaaagggatagcatgtttgtaatcttggggacaaattgtaaacagtaatatatgaagagaacattatcatgaaccgttgatgaatgaatgaatgtacccaaatgaatagagtataattgtatgcatttatactgcatgtctaaatattatatgtctaaaatagttgtcacaagaaaaagtgttggctctggtgttatcttgtagactattgcatttttggactagcaaatatttatctcgtggtacgtagttgccgggacaagtttaaaactccgactgattttaataaaaaagatcaacaatagagatttgtattttattttatttttgtagttggcatccttaacataaatccaaagaattttattcagcattcaaataaaccaattttaatgttaccgaatgaaaatcttatacaattatcttaaacatgagttttcaaaaatgattaatagaaaaacctatgttatatatatagaaatttaataatatacggtattagaaccacattctgtcttaaataaaaaaaaaaagataattaaacatacgtaaatcatttgagtgaagttagtacaaccgaattttttttttttttttttttttttagtacaaccgaattttaagttagttttattactttaagcctgtcattcgatcgactatgatatttttagaaatatatgtttcacttactttttgtagttactacaaaattgtgaaaagtatattatcaacaaaggattataaaattgaagaaatcatgacttcagtgatcgaattcttttagtgattaaaaaaatcaagaaattatgaaaataacacgaaataattaatttgcaaggatgataaaaaaaatggtaaatttggtaaacgtatttaacatgtcaaagtcaaacccttcaaatctcaaatattacaatctccatccctcttttaaacaccataaagccttaaacctcaaaagacatttcaacaacattcattttcattctcactccccaccaaaaaaaaaaaaaacagaagccatgaactcctcgtctcttctaactccttcatcatctccttctccacatcttcaatctcctgcaacattcgaccacgatgatttcctccaccacatcttctcctccactccttggccctcatccgttctcgacgacactcctccaccaacttccgattgtgcccccgtcactggattccaccaccacgacgccgattcaagaaaccagatcactatgattcctttgtcacataaccatcctaatgacgctctcttcaatggcttctccaccggatctctccctttccacctccctcaagtataactgataatccactttttctctctcattttgcaaattactacaaaagagaaaacattcattacatgttcttttgttaagtcttaatttaatgttttctgatatatattttagggatcgggaggtcaaacgcaaacgcagtcgcaggcgacggcgtcagccaccaccggtggtgcaacggcgcaacctcagacaaagcctaaagtccgagctaggagaggtcaagccactgatcctcacagtatcgccgaacgggttcgatttttttatttaacttttcctcattattcgcttttcagttaccgagaaaaacgtataaagttatttagatgattaaggtgattattgaaatattttgaaattatggaacagttacggagagagaggatagcggaaagaatgaaatctcttcaagaacttgtccctaatggtaacaaggtaaattttaattatcttcattagtctaaatttcgatcatcaaagttgatataattaaaagagtagattcaaataatccaatttgtattttacatttctttaatagtatatatctcaaaatgaataatgtgttaagtatatgagttacactgatgtattttagtcttggaccacaaattgctactagtttagtaggttatctagagatttggacttttatgcagtcaaatgattaaacactgattagctaattaattctaaaatttaattgataataatacttaataaacagatgcagaattgctaacaaggttttttttattgttaaaaataataattaacagacagacaaagcatcaatgctcgatgagattatcgattatgtcaagttcttacagctccaagtcaaggtgaatctctctctctctctctctcgaattattttataagatatgagaattttaaatttgtttttgttataagagtggaagcttctttacctttgagttgacattagaataagaaatcgaatatgggcctctgcaactaaaattccatatgctccctttcccttttatcttgtaaattatttatcttttgcgtttgttaaaacatagtgttagtgtatatctacctcttcttttgcttaattataatatttggcaaatttatgtatgcaggtactaagcatgagtagactgggcggtgctgcttctgcttcttctcaaatctctgaggtaataatttcaattccttctctcttaaaagggatgataggatgacgtgatcactatatagaatgagattttattttttaaactaattaaaaagagatgtaaattattgaaaaggttttagttagggaataatactaattaaaaagtagttttgttttcgactttctaaaaacaaatgaaaaagttttccaaaaaatagtaaaaaaaacaaaacaaggacagggcacgcgtgcctactttctctccaacaaataccaaaacctcccatttcaacatcatcatagctttagggttttgcttttcttgttttctttttaattttattgaacattttcaggatgccggtggatcccacgaaaacacctcctcctccggcgaggcgaagatgacggagcaccaagttgcaaagctaatggaagaggacatgggatcagccatgcaatatctacaaggcaaaggtctttgcctcatgcccatctcgttagccaccaccatctccaccgccacgtgtccttctcgtagccccttcgttaaagataccggcgttcctttgtctcctaacctatccactacaatagttgctaacggtaatggctcatcgttggtcaccgttaaagacgctccctccgtttccaagccgtgataacggccatttgtccatttcattttcccttttttgggtgggaaagagagaaaaaagtttagaagacaaagacaagtgggataggtggttttggtcaaagtttagaaagaataaggtcgtgttttcggatacgacaccgtatttgcgtacactttggttttctgtctttacctactacaaaccacccataagcacactcatgttatcatgtttttttttttttggtttataaagttatatccttaaattttctatcacagaaccggtctggtctaacaaatgtcgtcaatgatgatcatttaggccaaagagtttgtttaaaactcgttatgcttaagtttctaaatctacacaacacaggaatgtaacacttaagcaggcttaatttcaccgttttatatactcacatactgaagaaatttattgtcaatcgccaatgtggtcagcggtaagatctcatataaatcttcctagtagtgttcaagaaaatcactatatatgcagcaggggcttagagtagcatctaacgtttagaacacctagtcaggatcattttaggtggttaagagttttgtagagtgaatttgtatggtatacctctactatgacctactactataaacgaaataacatgatcttaatttatcttataagcacaaaaataaacagcaaggaccgagaaaacatataagatataaaccatttccatatataccaacgacctcaaacgtttacatgttcaaaccgtcagaatgttttctaccacgatcgaaaaaaaatagtctgaattgaaacagaggaaaatataatatatcatttcgttgtagagtctcttctttttattgctttggcatgaggtttgagttttgacttcaagtacaaaaaatgaatttattttgggccaaaagcatgtgggaaataaattacggcgaagtttggaagtattaggcttacaagtacaatagtctgggacacaatttgactaaaggagtgggtggctactaactccgcaccacacccattcatttttctcattttttacagtacgattgtaaccagatcccaaaacctaacctctcggctcctaaataaggctccaatagttagtttctcagtgacttttttttaatagtgtagaaagtatataagatacatccaacacccccattgtttaaacgggtcaacatcaagttttcttttcaaccacataaattttctcaaatttaaattgggatgatcacaaaaggacactaattcgaactactaaactacatatccagctcaaattactaattagtttggtgattatttgttcaattcgacacataatctctcaatttaaaaatttatttgtaagatcaatcaataattctatttaaaaaattggaaaagagcaaaacaaattctaggtgaaacaaacgtagtacattaattggagaaaccatacaatgtactaacacaaactatcagaaccaactagatttaaagcattgattcaaaacaaatctgtatctaccgatcaacagtagattctcatttcctgacccttaaatttaagcttaggaaaagatgctaccaacatgattgacatgcaaaaattagttcatacaataacatatgtaaagataacaatctattaccccattaaaatatgttgtttcaaaggaatagattagagaaaacgcatgaactggtttagcttaatagacctagggcaaaaatagtaatatcgatgaacaatatatggtaatgttggatatgggctgcgttgttacttattttaccccttttgatatctcgatcttacagtcagatgaatcaagttgaatcaagttcttgactaaacaatacatgaaacaagtagatgctagaactgtaactcaccatataagatgattaaattaagtcctgatcaataagcttggttacaggttctagcatataatgtggattaaaaacccaaatgaaacaaaatgggagacacatcaattggagagcacaacacacacacaccttttgactgacaccatgcatcaacatgaatcaagttcttgcctaaaaatgtagagacgaaatacctgagaaatgttctcggtttatatgatatgcaaagagacgagaggaagtgctggtgcatctgtggattctgatcatagtgattttgccaatctttggctccttgtctagccacttaatccaccatgcttacaaatgtgtaagtatctatacattataaaccaccataaactcttaaaatgtgaaatttaatgaacaatgacaaacgtataacgcaaattatgtaaacaaacagagtactaattaaaatagatgtttctccacgatcaacaagctagaaggctcatgtaaagtgacttaattggtttacctgtacacttccgataaaccttgaattagatatatccttgaaatgtcttcccacatgatatttgatatcatctttctgcaaaagcaatagaacacaaaatgaggttgttattattgattttcagactgttgtcgtaaaatccacaatacaatatcatgttcatggtataactgtctctagagttacctaaacgcataccaatgcacttaatcataataatacgtctttcagtttatctatcaaataatcagtatagcttaacatccaaataaaagaaaacaacatagtagcctaacacatcagatgatgcagatcacatgatatcagagttatgataaaatttgcttctacattcagtccctagtgatgactacatgatactctaaatcaaaccaaaatataatttagattctttcaaacagtttatgaacagaatcatctctatagctctatcccacttcacctgaagtttaattgctcactcaaactcaccaaaagccatgtgtctccccatttgttatctgttttatgacttcaaagaatgatttcagtgtgaagcccttagacaccaattctggtacttaagcaaatttacaatatggtttcagcagacacacacacacacggactttgcagacttgaatgttttgactcataatcattgcaaatttagattacaagcacttgataaacttatttgaagacattgtgcatgcacttagacatcaaagctagagatcaaaccaacaaagaataaaatcagatgatataacaccaattaagcaacttaattaagatcaaccatttcagtagaaaaaataacattttagcaattattcatctccgttgttatctatatcacgacttcatttgtggacttcagggtgaagcacattagatactagtaccaagaaacctattcacaatttgatttcttcaaactcaaacgcaaagacttttctcatttatgcattgacactacacagtacacaatataagcaaactctcattactcatttatggaacaggaacaacataaagccaacattctgaaagaaaaacaaaacaccaactcatgcatttgcttgaacagattatataatgcaattagtaatcaaagcagacttagaaaaatcactattcatcaatttcaaaagcgacaatgaagaaacttgcaagaaaaaaacggataatagagagcattaggtatagggttcaatttttcttttggatctcaacttgcaaagaaaccaagttagtgaatgtctacctactaccaaataacattaattccaaggtagacttcaatgccaactagcattaatccgtacaaacctaacacaaaaaaggaaattatagatcaaagaccttttaagaccaaacagctggattcagtgtttcattaccaacttgctcagagaaaaaaactcatgtttccattgaaacagtactcaactagggtatacatgaaatagaaccgaacaacaatcatcatacaccaattccatcataatggcttctggtgaaacctgaaagccacttctagtttctgatagaagacgaaaacataatttatggttcactcgcatgtagcagttaagatcatcagagaatttcaacatgaaaaaactttataaggaaaaaaaaatgagacaaagagacaatcaattagatagaaaattaaatcttgagaagaatgtgtaccggttggggttcatgatcatcaaaactcgcgctttccctagatcgcactagaagaattcaacattacagcacacttaaccaaattacatttattagtattataaacccaactatagaaatctgagcttatctccaccaaacttctaaaaaaaaagccttaaaacaaacattcttatgcgtaagcaagcacccacttccacataacatagaaaaacacacaactaattattatcaaaacgcatttgtcatatacacatcactagcaaaagtgcacaacagacgagatgataagaagcgatcaaagaaagaaatgtctaagccaaatttgagagagagagagagagagagaggtcaagcaggcagagataggcaactgacagaaagagaggtgagcacgcacacgcaaagttatagacacataacagtgcctgcatgtgctcactctcttctgtcagttttctctgttgcattcctcaatcaccatctctccctcttctagcaactaattcaaaaaaacctagatggattaagaactcaactttcttctcacagatctctccaaaaccctaataaaaaaaagttaagaaattcactgatctttcaaattccaattctcggagatttggttgttagataaggccataagggtgtgtgttttcgacttctttgaatagactctaatggcgaaacagtcgatatataaagagagaggatggtagataggagcgagaaaagggttcaaagattgacggagattgtggtttttttccttcttttaatttctttaatctttcgtttttcctttccaaaatggagagacatgatgttttgtcaaaaaagggtttagaagatttctacacgtgtcttacagtgagtgggtgtttaattaacttcattaaagtcgggtttcagagggtggcgcgtgtgtaacacagccgacgaaaaaatacttaatactgtatgtccaataaaattcagacctacttttatttcctattaatttgatttaacattgattctgtaagcaaaaggtttgacggaggaggatataggttttaatgtttttgtttttgcggttacagtgaaagaggtaagaaatgattgggaagtaggcatgagcgtataaatcaaagtttagtttgattcgattttatagagtgaaccaacaataacgttttgtattacttatcgaatgaatcaaagtttacttctggtggctacttggctgcaaaatgaaaatgaggttgatgatttaccaagaaaggataacagatcatggagcgaaaaaagaatcaaggatcaaaagatgaagtaagaaagaacaatcacgtgttagctagatactagatactagatagcattaaaactgaaattatttagaacttgtaaaatggtttgagtgaaggaaatatatgtattatgtaatattcgctcgaatcggtttaccattttactcttagaagaaaaagaggcctgatagaatttctaccaaggccatcttagagtaggtattttaaagggttgttctttcttgattgggtcaggtttcgaatttcctttttggacactaatcatgatgagtcttttttttattgtctgttagtacatacatcatacatgtcttttcttaattaactaattacgtcaggtaaattgatgctagtgaaaaacaattccactaactcagaaagatattttatactgaaatcattaatggcattggtacattgtacattgtacagtttcactaattactatgggttagtacttagtattactttattagtattatctgatccttatttttcaggttttagattcccatttagacatcttccgtatacttttacaactatagtactgtaaaacaaaacgaaaagaattttagttttgaaatcgtagaatcctggactagtgacatgattctgccattcaatattttaaataaaaaaaatcacgtaaatgactttagtgatttgtcaccaacattatctaaatgtagaggagtaaaaagtactagtaaactttcaaatgttggaaatctaaaactaccatcaaatcaagtgacaaaattcttgtactaacctctgcttaaaatatagataaacgaagctctattaatcattttgtcgacttgaacaataatagctataatgagagcacatatacagtgcacaacttgtggttagctaagcaaagttagcaattgactaatttgattgatcgactcataaatcatataaaatcagtaaatttatatattttcatttaaactataaacagaaaaatcattaggtcactacatatcatattattaataaaaaaaatgtgagttatcatttatgaaagcattatgcttattatgagtatcagtaaatttatattttccttagtatcatgataaacactggattagggatccgtcatgcttctataaacattatgcagtgagtccaatagcacaagtaagtactccttggattctttcgcacgtgaatttttttttgtcttcactaaggaaaataattatggcgttgtacacagaaaaaaaaaaaaaaaaaaaaacaactagaaaaaaaaatgtaggatgatgatgggaaataagaaaaaccatagggacatctcgaattttaaaacctatgaaaactcaaaagctatttcactttttttttttagaagtcttagactctgcacttatctacatctcatttgtccacgttttatttcccttttgtgttctttcacaaacatttatcacttgtaccttggtatgtctcactctctatatataatttcgaaatgtattgagtagtaatattttagtggactaatcaaactgtatcacatgatcacatgtgtctcacaaacatacttgtttgtacagtgttcaacagacccaaaatcaaacgtatgtatcaacagacccaaaatcaaagttagtcggtcgattaactcggatttacgttgtggccttattgcttattggtttatccttccaactatatatccacacccatgaacgatccagttacaaatctgaaggttgctcaatttactcaattagattatagcccaatattcgggcccaaatatggatattagtctctgaagtcccaacgtttaggttggtaattttgtatttgaccttttcttttgagttatttttaattttgcatttgaccttttcttttgagttatttttgtaaaaagatatattttatttctgttagtttacccttaaaataattaacgatcacattgcacataattatgatatcatttaagaaaaaaaatcggcttattaaaaaaaaataatacatcagttgagatacaggctaactaacgctttgaaaagccagcctaagtgcctaacataagttaattttagacagatattttttcacttgagattttcaagttttattagattagtttagtaattttcttttataaattaatagaacatttgcctttatttctgttaaaactctaaatgaaaaagtatgtattggaagttgacctgaccctaaggtccccaactctcaccgaactagtactcgaatattcgaatttagtactgattataaaacttgacaccaaaacatgtttgtatagtcataaaaatctatcacctaacaaattaattgaagttttcgtaaataccacacagttaaaaagttgtttcataaagaaaagtatttcgtatttttacaataggtgttgcaaaaaaaaacgttgtgtgaaaagattaagatatttaatttcatgagacggagaaagtaacaaccaatttgtcaaccttctaataacgatagaatataacataattgatactggagaaagtaagatatgaacaaatcgtgtatttatatatctatataaaaaagagaatcgataagctttgtggttatgtttgataacccgtcatataagaaataaagtatcatactttttggatctaatctatcatatatggacattgattattcttgtttttagcgaattgctatcactaaactaaatcatatctgttagtcccacagattccacatgcatatgtttaacagtagcccaaccaatatgtaacaatgagaataaacttaaagagattcaaccactaagaaactaaataaattatcctctcgattatttccttataattgttcccaaagatatttgttggaacttggaactttaataaattaacaatttgagaatgtgttacaccgaagctcaatgacagaagacaaaactccacttgtttttttaatctgtattataagatctgatctaactcttttagtctttcttttccaccattttggccttagcaacatgcaacttcaattgtgtcaaactgtcaatccgccagtaaccaacaatatattgacactcacatgtgacatatcagagctcattaatctacacgacgaaggctttaatggttttgatccaagcatgagaccaaaacatatggtattagtgcaagcaaactgaaaatgttaagagttgtaaatggacgattagaagtttggaacgttacattactattctctcacgtaactcacgcaagtgttataaaaaacaaaattagttaaagtttgataaatcccactttctcttgatcgtaatcactattcaacttttgttaatttcatttgttttggcattgcttgtttcttctaatttacttattctacatttgttccgcaccaaattcatctagtataatctcactattcaacagtaactatatttcttctgtttgtttcatattatctgtttgttatgcatcgaattcatttgttcaacagccactatttgaattctatggatccttcggattccaagaataacggataagaacccacatggagaacgcttcaacggtcttcacatgtcatagctcttctagttctgtggacagaagcaaagccaatatatctttgggtaatcaatattcatcatgtctattgtctcgtcttattaaagaaaactaaaaagtatgaaacatatataattaaaacgcatgtggatcaatctcaccatattcgactttataataatactgtatgatttgatttatcccttaaagatcagaaagcaaaccttaactttcgtcctgagtaattctgaaagagaattccgacttgcgatcgatgaacatatgataagtgcaatgatttttaatgggatagatcaatacattaatgcgtttcagttataagttctttgattttcctatttcttcagtatgccataattaaataccaaaaatagttaaagatttgtgtaataaagctttagaaagaaacaaatatacaccacattttctataatttagataaaccacaatcctttttttaatgagagataaactacaacttttaatctgtaaagttctatatatataatctgggtggccgacagtttcatatttttggatgaagaaagcaaattttgatattatctgaagggtttagcagaattctacactcgtacaagatgactgaagaaaattgcaacgaggagagctatacaaacggttgacacactctaattttgttctacataaatgatagatcggcgaaactcgtactgatacgttttcttaaaactggggtagacctttgatcgaaactcacgttatttttcgatggaaacaaaagaacccttcacagtttcaacgttgtggcagtaaaagatggttattcatttttcgttttttatgttacagatcatgggttggtgtttgcatctccgttaatgaatcacatgtttgatatgattatactaagaattctattaaaaagagagatatatactaatataatattaatcgggttcatgaaacatccatcccaatcacgtaacttctacttttgttttgctgcccacctcatcttccttttacttttcatattctattcactcatctgaatccatctactccactattatttataatcaacaaatcaatgaatacttgtcacgatcattttattcaaaaaaaaaaaaaaactctgatcactaatcatacaatcgtcgtcacatttgtgctaatcatatccctattgttatatgacagattttactaactcgacttactccacaagccctctatcatcgctagcgactgaattaacttgatgattctactactcatcttaccaatttaaaacgcataagctaaacgactcaataaagtaaaaacgcagaatttttttaagtacttgtgttaatacaatagtcacatgaatcttgaagagtatatacatgattcaacacgacactacaaattggaccagcataaacaaagatgatgtcctaatcaatccaaggtaagaagagacgtgcaaaaaaaaaaaaaaagacatttgatgagaatgaatgcataaaaattgactctttaacattcttaaaagagtcatgattattatttgttgatgatggaatctttaacacaccattctacaccacacacaacattctctgcttcgtgacgcaacatatcggccacgactcaaacacacacaaaagacttacaactttttgaacgatccaaactatgataccacattaagaatcaaaaacaagaatcacgaatcgaatctagaatccaacaatatatattacaacataaaaatttgaaacacgcaagaattcatcaaattcaagcaggtgtagaggtccagaaaatgtccttgagagctggtctaagagcagtactgcagaagttgttgtactcaagcgtatctccatgatctttcttcacttccacgacaacaaacgacggagccaccgcgaatatctccgcttccaccgccaatttccctttccgaccattctgtttaccttcaatccttactctactctcactcttcctcacatcaaacttattcccaactctcgccgcttcttccaaactcgaaatcacgctactcgctggccgagacgtcgcgaatctcatctctcttttctcctctttcttcttctcctcaaacaacggcgacaaatcaaacccttccgataacgcgattatatgaaacgcgtttaacgtctccgtctcttccttcgacttgtgcaccaagaaatcaacatcctcttccgtggttgtgattgtggcagccactggttcgtttcttgatctcgttgcttgtttcttgaaccaaggcgaatccataaccttctcaatagtaatcctcgtattcggattcggatcaagaagcttagtcacaagccgtctagcatcagaagaaagccaaccaggacatttgaaatctcctctgtaaatcttcctatacatattcacaagattatcatcttgaaacggcaaataaccagcaagaagcacaaaaagtataacaccacaagaccacagatccgccttagctccgtcgtatcctttcttcaatataacctccggcgcaacataagccggagttccacaagttgtatgaagaagtccgtcttgtttcaaatgctcagtgaaagcagagagaccaaaatcagtcaccttgagattaccttcttcatctaacaagagattctccggtttcagatctcggtgataaacaccacggctatgacagaaatcaacggctgagatcaattgctggaaataaacacgagctacgtcttcacgtagtcttcctttagccaccttagcgaataactcaccgcctcgtacaagctccatggcgaaatagatcttggatttactcgccatgacttcgtgaagctcgacgatgtttggatgtttcaccatcctcatcacagagatctctcgtttgatctgatcaaccataccaactttcaccactttctcttttccgacgactttcatcgccacgctttttccggtttgtatgttacgagcgtggtacaccttcgcgaatgttccgtgacctagaagacgccctagctcgtaacggccgtgaagcagccccgtactactaccaccgtcagatccattctccaccggttttgctccgaccatggttttttactttacaacgatgattagagaattttgtaaaaaagtagaagaaaaaaaagatttacagtttttcgatatcttcgaagaattcgagagacgagagtttagaaaactggatcacccgtcctcgacgtgtttccggtggcaattcctgccgccgacggatcggttaaaccgatcacacagcttagtcttcaccggcgatactccgaccatctctctgcattcccttacttaggatttttttccccgaaattcaaatagagatttcagaagtaaatttttgagtaaataaacgaaactctcgtttaaagttaaaaatcttaattctccttttgccgtcggataagagctagcaaaagagtagtgtttatatagatcttaacgacattgcaattacgtagatacccttattagggagtgataactacaccgtttaacctcctttcgctgactgacatgtgtcttcggcaatcccttggcggcttcgagtttgtcaattatttggatagcgatgacgacacgtgtctttttatgaccggtcacgatgcgatttactattctatccctctagtgtttcgtattacggatagggattaacggcctagtgattaatttttttagggcctgacggattaaaatgcagcgggtgcggttatggttgcggaagtttgcggaaactggcggttgcagtttcaagcgttatcaaacgttttgaacgactggttgaacgtttgataatgggtgcgtttgcgggagttttatgactggtaaaccagcgggtgtgatagtaattaaacaaaaataaaccaaaataaatataatatattactattaaaagaaagaaaaatataatatattattatgataaattcataatattagaaaaattaaatataattaaaaattaaaaccgtaaataaaacattaaattcaaaaataaataaattttgcaagaaaaagcttaatactttatgcatttggtacatcaccaaaaattacatcaaatagtgtgataaactgtaaataacgttgaactcgcggattttccagattgcctctatacatataataaagtttcttcaagatatccaaacgatttataacacatctccaactcaaaaaaaaatcaaactggtcgtgaatggatgaacgaatatatgatacttacttttgattattgattttgattttaatttttatccgtttgggtggatgccataattgagagaatagagttacaatatattaattattagagttttctaataagaataagatatatagggtttgggtggaaaatataattattttaattaattataaaaataattttttttttaacctaaccgctaccgcccgcaaccgcaaacgcttgcgggaaggagcttttgaaatctggcgatttcgagcggtccaaagcgatatctagcggtttatatgattggtgccaatcgctaacaaccgctaccacccgcaaacgctgcgtttgcgggtggcagagggagaaccaatcaagcccttagtttaactgactacttacccatttgcattgcattatgcatatggataattgagggaaatagcataattatatacaatgaatcaagttctgtatctacaaaaattcataaggtttataaagaaaatagttgtgtcttaatgtagggtctgataattttccatagattccatgattctttactataatttgtgttcaattgttttcattcgttgtggtccttgtggaccattatgtgagtgtagattctagggttttctacttcatttctttgtttttatacacgaagatggtagataaactgtgaagtttttcttgtttattttgaggctataatttttgaaacggatgttgtagcaagaatatataaattaaaaacattcatagatatgataattatcatgtggtccgtaaataactaaagtttggtttgctgaagattctctatattactacaatcaatcaattagctaatgagttttgagaagattttttttgtttttgttttaaatcgttccattttaagaggaaatattagatatgctattttattaagttgttatgcccaacaaataagtcgttccatatacttttcaaaatgttaataacatattacataaaaaaaaaaaaaaaaaactggattaatcacaaaactgaaaaaagttttgaatcacagttcaaccattaatttcaactattcaaaccaggttaagataaaaattagtgatatacatttgaaaatgtcaattacaaaaaaaaaagatgaaaaattgaattaaatacttttgacttttgatagttgtagatgttgatatgaaaattcagctataaaaacaatttacacggtaattttgtatatgtggcatttattattcatttctatagctatatttgtttgataaaggtatctataaacacttgtaaatgttttttaacttaactttagcattgaaaagttaacaaggaatcattttttcatgatctcatacttaaacagacgagtggcgagagcataatacacgtgaaaatgataataaaacataagtatgataaagtgataagtaacggaaatgaaaatctagtataagttaactagactactagatgacggtttatgtacgtttaccgatatacgtatgtgttttgtctacactttcgtatgttttgtgtaacttgtacaagtcatacgcacacgtgtcttccttccacttgatagtctctctgttgataattagttgttttatgcgtatgtttaaatttaaaaatggtattatattattttttattttgtttactactatatattgatttcaaatgcaacgccgtagatagtattagtcaaacaaacaattaaattaaagtaaacgttttgatgtagtcatacgaaattgccaaaaacattaaaaaaattttggtttttgccttgaatgacccaacagaccaacatgatgctctttcctcctcggccaccagaaacgtttgggcggctctcaacgtcagcgatccctacctttcttcatgtgtggaccttctccgatccttcttatattgttatacataaatttaaatattataaacgatatgcctatgtgatttagtgtgattagatttagggtttataatataagttcttataaatattgagaagagtactgcatttctgttttcaccacaaaactatgtgcgattaaaacgatgtgctagctggagttcaatgttttaattcacaatttacgagactcctttactgctttctgttctgcattctctgttgcttctcgttaataattcttctgagatcatgcctacacttgcacaaccacaccaaaagaggagtactatatgaaaaaacctgtgctattattgcctacatgcatgggacaaaactatatttaatgtaatttgatattcttggaataagttgatgttgttgtatgggcaatagcgatttcaatgatgtcaatatggtttgtttaataattcctatattatatgccattatatattaattcatagtcaactgaaaagaaatgtgcattgtcaataatactcgaggaatattactgcttgcataaaataacattaatagtctaaatgatgagcccagtctcatcaattgcctttagcaccattacttcttgcaagttgcaatgcatgcacttgattagattctctataaactattattttgtttgttgatatatataccaaatatctcataatacaaatcacagaacgaaatgaaacgatatatatgagtttctaattactatcttgcttgtgcaactatgtctagttgttatatattgtattgatgtgaacggatctatcaatattaaagcaattatagcaaacctaaaaataatcctgatatttattgaaacaattaattgcatgttctcttggtagcagtttaacggggggaaacgaagagaagaagcaaaaacaaaagcaatcacaaagaaacaaagaagggcagggattttctggttcaggttctattacatgataacgtaagcaagggacccaaaagtatattctcacactttggtaggcggtgtcttgtcttttggtctcccccgtcgcgagtaagtactacacttaatattggagtataaaaattaatgttttggcaaattatgatcattaagacacattggagcactaattaaacgttaagtcgttaaccaattcaattttgtcatgttatattgaaagttgaaaacccgtctttctccaaaaacattcattcatttagtcatcgggtggtgcacgtgagacccacgggtaaggtgactgtggacaattacatttttttgtctacgactgtggacaattacattatacgtaacagtttttgtaaaagaaacggaattattatggggaaattgattaaagtttttgtccaaaactcctaacacgagtgtccaaatttgttgatttatttttggtattagtataagattggaatctaatatgtattaattaattagttagtattattgtaatcaaagttgttgatttatattatttgtaagaatcaaatcatttgttcgtggagagccagcaaaaagtatacacgtgtgacataatgcacgtcaaggccaaaaaatgtactctgcatgcaggcattacttgcgtcttgcaatatgaattctcaataattttgatacaaaaagatttctttttaatttcattttcaaaacattatcaacaccaacgtaccatcatcgtgtctgtgctatgattccaatttttgctctcttatgacgaacaaagacgtttcgactgtcactagacaaatgacaaacccgtagaaatttgtatattattaattactttataagtttagtattaaattaattggaaagataatatatatagtcctatagatactaaacaaataatttaaacaaaatatcgttaatgtaaatattataagttagacaaattgattgaaacatgtatttacctaaacgctcatcaaaagcttaaacgaatacgacatgtaactgcgattttgatatatgtctccattctatatggaacctcgatgtttgacctttctattgactactgtacatgttgatataccatggatcacgaatattcaagtaacatttagtcaattcttaatgtgtgcaaactgcaaagcctagcataatatacagataataaatttacgtaagaaaaaaagttaaagaacaatacaatgcatggtcgtctaagtaaaaatttatgttgaaatttctttacttctactcgtcattagttgaagagaaaaccttttttggtgatctaactcacatatgtacattaacctatttaaatccggttaataagatgatagcgaaactttatacaagttgtggatctctagactattatcttcgaaaattatatattttaaatgcatatatcaatgtgtgtttatacctatatgaatcatgcatgtcattcatattcaaagtttggtctcggtgggtttcgttagttatatactgattatggaaagcaagtgccgattcgtggatgaaggagtttcgtcttgtggtgaacgtggcaaagtaaaataaattgaaagtcttatcaagttttggtggacgaataaaattggaaggaaattgattgattgcaatggcaataacatcggtaactagcggacaagagagttcacatggaagctctgtaaacaatcaataatggtgtgtgttggttccaactagtatatcgatcattgattgcgaaaagacatcaaacacagacaatatttaacgaacttaactaataaaagtgaggctgttaaaaattaacttagttcttgcggcatatcaattattcaatatcattttcatgtactgttttggataaattttatatttttagtgtgtgatacttttgattggaaagtgtcacgcaattataagatgtagcacattttttacttaacggtaatcaaattggattggccaaccaagtgattggtcgctttttcaacctaggtctgcaaaaataatcttgattagacgcattttctcattggctactttgtaaattcacatatgtcttcaggatttgaaaaataatagtttcgtatattagagtctccaaatgctccaaagaaaactctagacctaattttagtttggtggactcagcacgaacctagctagactatcaagttaagggtaaaacataatttttaagacatgaacaacttcgtgagtcgtggcaagttatgttccaatcaagttgaatcacatcttatggacttttcgtgcattagtgtaccagggtaatgtgttgtcgcaactctattaatcgtcggatttttttttttcgtagatgtagttgggctcagcccatactgatttaaaagtcccattcttcaaattgcttttgaaggaaaacaagaagaaaaaaacttatcgttaggtatatgccaaggttagtttttgtggcgatcgtaaaagaagtcacctgaatctaaagaagcagacgatgaatgacgaacttggctttacacaattaagaggagcgaaagaaatcgccaagcaaacaaaataatgctattttcacgaacctaactaagaaatgtgaggctattaaaaagtgtttcatatatatgcgatcgacatctactagccgtaaaatgtcggtttcatatcatttatcaagctaatgagtaatgttaagtcctatcaatttggctcacacagttgcggacttttcatgtgaagcttagctaatgctaatttgttgcaatactttttttttgtcgacaagaatttgttgtgtatatagaaggatatacacgtatcactcgtaacgcatgttttcaataaaactcaaaacaaattagtgatctaaaaacacggcaatttgatgacataaactattacacgtcacttgtaacgtatcattctcttcattccgttttttaaaaggatagacatatttatacacgtcaaaaaacataatgttgtatctgaacttgaaactgaacttagtagaaatagaattttcgtataaaaggtcttattgtatttgtgaacaagctaattaatagacatagaaaaaatttagtggagaattgtattagtttataaatatttgtgaacaagctaaataatagacatagactccaattgatatttatcattacaatctaaaactctgaatttttttaaactaatacagttctccacaaaaaaaatactttgattttgagtatgaagatttaccaaaaatttcagtttttgcccaacttgccaacctgaaatttaggtttataaatataaatattagaaaggaccccatgaaattaggtttatatgagaacatattttaggaatattcgagttttggatttatcattttgaaatttataattatctttaacaaaaaattgataattatctaacccttttttttccccaataattcttaaccatttttgttattctgtattaaataaatattgactattaatcattgtttcgacttttctagtatgcaaaattttagtttctgacaaaaaaaaaaagactgaaaaaaacaaaaacccaactttaaaattgtggaagtccaatttgctgaagaaggtgaagaggtgagggctcttcacagccattcaatctcataagacatattgccggagaaactctctcggggggtcgcttcttctgcattttctgcttcccaatggcttccagaattgctgattctctcttcgccttcacggtattcctttttcaaattccttatcccaaaaaaggcttcatttttccaactcttgtctattgcccatctctgctacttggatgagtttcccataatgaatttgtttctttgctattggtttctcagggcccacagcaatgtcttcctagggttcctaagcttgctgcttcttctgctcgtgtttctcctggtactcttctcctttctcctcaaaactcctcttttttttctcaaactaattacaggggatttggaaatgggagcttcgagttatctagtttcaatagaagtattcaatgataagcaataaaaagagtgaatttttgagcaaagttcttgtctttcttataggggttttgtttgtgtttttcggattgcaataatgatgaatgctgttagttcttgttgctaatgtagtgaatgaatcattctattgtggttgtgttggttggatggatacaggtgtatatgctgtgaagccgattgatcttctgttaaaaggacgaactcatcgaagtagaagatgtgtagctcctgtgaaaaggagaattggatgtatcaaagcggtggctgctccagttgcaccgccttcagctgacagtgcagaagacagggaacagttagcagaaagctatggattcagacaaattggagaagatcttcctgagaatgtcaccttaaaagatatcatggatacacttcccaaagaggtatgcctttttcaataagccttatgtgtgatttttatggaacttcttactcatttttggaatacaaattgtcttcaggtgtttgagattgatgatctgaaagctttgaagtctgtgttgatatctgtgacttcatacactttggggctcttcatgattgcaaaatcgccgtggtatctgctaccgttggcttgggcatggacaggaactgcaattaccggggtaagctctcctccactgtcctcttctgtgtgtcagcttgttactgttgtctaaccagatttttctttcttagttctttgtgataggtcatgattgtgcacataagtcattttcaaagaacaaattggtggaagacattgtgggtactctcgccttcctaccacttgtctacccatatgagccatggcggtttaagcacgaccgccatcacgccaaaaccaacatgtaagtctttcttagactgttaaagatatccgcaatagaatgagagataggaactcatgtttccgttttgttctctctataggttagttcatgacacagcttggcagccagttccgccagaggagtttgagtcatcacccgtgatgagaaaggcaatcatttttggatatggcccaattagaccttggttgtccatagctcactggtatatatagattaactcttacgcagtgatcaatttttttcaattttttttctctctttatatatctctttactcaactataataagcgttctaatagggtgaactggcacttcaatctgaaaaagttcagagcgagcgaggtgaatagggtgaagataagtttggcttgtgttttcgccttcatggccgttgggtggccactgatcgtatacaaagttggtatattgggatgggtaaaattctggttaatgccatggttgggctatcacttctgggtaaatgcttctattttatgctttttccctattctctctttttcgatatagcaccagaagctaagttggtttcgcattattgtttctctatagatgagcacattcacaatggttcatcatacggctccgcatatacctttcaagcctgcggatgagtggaacgcggctcaggcccagctgaatggaactgttcattgtgactaccctagttggtaatgcataccacttgctcagatggttaagttgctgagagctatcgtttggtttcatatgtactaatatttgtgtgttacgacaggattgaaattctctgccatgatatcaacgttcacatcccgcatcatattagcccaagaataccgagctacaatctccgtgcagctcatgagtctatacaagagaactggggaaaggtactaaccactttcttatctcgtaaatttgttgtgaataacatgacagtaatttgaaccacaacataataagtgttcctttgggaagttaataagacactaaaagtttcctgggctacttcttttggggtgttgttgcagtatacaaacttggctacatggaactggcgattgatgaagacgataatgactgtgtgtcatgtctatgacaaagaggagaactacattccttttgaccggttagcccctgaagaatctcagccaataaccttcctcaagaaagcaatgcctaactacacagcctgattcgccatggtctcaaactagtcttttgaaatctcaatatctttttgcagtcgccgatgttatatgtaagctttccaagcgatgagcttctctaacacttcaccaacgctttatactgttatcttctttccaatcttatcagaagagagaaactggtcaaattatctcagcgattgcaattcttttatcagtttcttagctataagaagattgaacagtctatatagtttgcaatgtactgtaatgtgatgaaaatttagttgatgagaatctttgaagatataaacatcatcttcttactgtgtctgcaatatttccgagaaagtcgtgggaaaaaagccaaaagaaaaagtgaagagagaaaagaaagctaaagcaaaattcttgggacttctttacggaaagtggaaagacaaagtcattcactgtccaacaaaagacactcacatgtccaaaataagggagcgaatcatcaaatctttagaaatctgagactgtggtcacagttcacaccaccatgaaaggagcttaaagctaaaggtcaaaagaggattaattctttacattgagaaagagtcatataaggacaaaacagaacacaacctgaaactggaaacttaaaatcgtattaatatcaatcctaacaaaagtctatgatcatgttctctatgtttatattctcttgactattgctatttctctcatcctatatattttctaacaaccctaaaacattaacaaaagaagcaaaccagaagcaacagaaacagaccagactaagctcaagatatcaaaatgtgaaatcagatgatgggaggaggaagagtctcccacacatcaaacacattctcctcactgtgcaatgcaaacaacctatccccaccaatagagaaatcacaaatggagccgccatagcttcttttcaacctagaagtcaaaacccagtctgatccacaaaacacagagatggaatcattcatagacgagaagagctggccttcatgcaaagcaagtttggggtaacaaggctcatcaggcatcttgcttttcatcaacctgctcctagaactccacctcacactactccctcctccatccatcctcagatcaataaaccctagatcttcaaactcattcaccacacatatcgaattgctctcttccattgctatcgcgtctctcactctcttctcttccgccattgtaagaaatccgatatcagaccaagaccagaccatgttcttctctcggaaatccaacaagctaatataacagttatctttccttggaaacaaagtagctacaagaagacaattcttaccactcaaccattgcaacttatcagcatctcctaaagaccaaccaggactctcgtaaaagaaatctacttgctttccagtactttgatcccaaactccaatcccatactcattacttcttcctttacagctcgtaaagatcttagaatcaggactaaaactcaaagctccagcactataactcttaacctgattatcatgactaacctgaaacttatacctaagctcaccagaagatgagctaaacaatcccattcctccatctcctcttcctaatctctcacaagcagagagtacaatgttaccagaatcaatccaaccaacatcgttcactctctggtaatcaagattaatcgttggatgctcctcaagcatccaatcaaagacatggacgacactcccatgagctatgcagcatccaccatccggaccagctcttatcgccgttccgtctccaggagctatgccggtgacggaacgagataggtggagtctgttaccgtcgaaaggtccccactttgcggttcgtaagtggtctattaagccgtagaacattgcttctttgtgaaggagacgctccgggatattaggcgggatgtttaagtctcctgttcggagaagatcgagaagaacagcgaagcaatctggattcctatcgatgaagagatccccgggttgtgaaagattccaattttcgtcgaataatgctccgaagaaggaatcgcgacctgcgttagcgagcgttgtcgctgtcgtttcgaagattctgccaccaacgttgaatttgatcctgtcatttgataaacccattatttctgatttctgaaaataggtgaaatcaatgatttttatggattcgaaccaaaagcattaatgacaagacaaggaagccatgaacgctcgaactcggattgaaaatattcgaaattcgatcggattcgaagaaattgaatcctgggaaaggataacgaaatgaaatctgatttatgattaatcaaattgaatacgatgatctggactctggatatttttttaaaaaaagctgagattcccagaagagaaaataaaacgatctgtcttggtctcggacatttttccgttgctcgggcatttaaaacgtaagaaacccaactggaacatggtgggacctactagagacaatactcgtgttactaccgtcagatgcttttagatattgtcgtctatcctgcggtcgagatttcgtgtaatttcaaagctaataccgtgatccatgataacgtttctaaagcccatatagatagatatcatcccattaacatatccttttttttgtatgctgaaatggggccattagaagccctgaagaaaatgaagaatacaaacaatttcgttttttccattgaaatattttgctattttcgtgctgagtcttatcatacattaaagtacgtatatgtttttcctctttcagtcactattttggaagaacgcaaaacaaactccacttttcttgcagttgtttcctctataaagtaagtaatttaccactgtactaatcttttcggggtcagtcatgatctaaactagatggatcaacacaacaaaaaattacctttgatatatcaaaattcgtagaacattgaccatattcattatgctatttatcaccacatcacatgataataaacaaacaaacatcctagatagtcttaagataaattttacatagtaaactaaacggaacacgtcaatgatttgacgtgacgcaggggtgattaacggagaaataaacggagttggtttaactatctacagtcaaacaaagactgaaagacattaatgccccttctttctctttcttttttggtatctttttttctttcttcttttgcttttaaagcagagaaggcataataaaggaccaaaacgcagcgttttcttccggagatcagtcggtcggaaagcggctacctttttgtctgcctagagaatttgttcgtttctttcttttactctcttcagacaaaacccacgagatacagaaaaagaggacaagagagaatcgtccatggaagaagacactggtatcgacgaagctaagacatacacggtggagaagagcgagaaagtggagccggagaaggacggactgagtcaattcagagacgaggaaaaatcacttggtgcggatatggaagatttacatgatgagactgtgcgagaaaccctaggcaaggatcaggttcaaggtaacggtttattctgcgcaaaattctttattggtttttatttatttattcgagactttattttttgacgaaatgatgtttgagtttaccaggtgttcgagaaaattcctctgtggaaccaaatgttgaagatgtattagaagtgaatgtgagtttgcttcagactcttctgctattcataaactttcttaacacttacaactttgattctctcattaacattgattgtgctagaacttgtaaagtttaactcatttcagtgtcttcgatgttactcgttcagtgattatacaataacatgggaataggattaatcgtaatggttttaacctttggccaagttcaatctgtatctgtatcagtttgatctgttacattttagtgtgtctgatttcttaggcaattctgaggacaagaatcactgttatcaaggcatgacatttaactgctttttgtatcacattggcaggagactgatagcgtcaaggaaactgttgtaagtgcgattgtgccggttgatgaagtggaagagaatcgtcaggtagaaacatctccttctctggctgcatcgtcagactcattgacagtgacgccatgtctatctttggatcctgcaactgcttcaaccgcacaagatttaccactggtttcagttccaactaaacaagagcaaagatcagattcgccggtggttaacagattgtcggttactcctgttcctaggacaccggctcgtgatggttataattggagaaaatatggacagaagcaggttaagagtcccaagggctcacggagttactacaggtgtacatacactgaatgttgtgctaaaaaaattgaatgctccaatgattcaggcaatgtggtagagattgttaacaaaggtttacatactcatgaacctccccggaagactagcttctccccgagagagattagagttacaacagctatccggcctgtttcagaggatgatacagtagtagaagagctatcaattgttcctagcggttcagatccgtctgcttctactaaagaatacatctgtgagtcgcaaacactcgttgaccggaaaagacactgtgagaacgaagctgtggaggaaccagagccaaaacgaaggcaagtttgtagaattttgcatttcggtgcttactcttcactttgaaagatgaaattaatagactttcttctctctatttttcagactgaaaaaagataactcacagagttcagattctgtctccaaacctggaaagaaaaacaaattcgtagtacacgcagctggtgatgttggtatctgtggtgatggatacaggtggcgtaaatacgggcagaaaatggtgaaaggaaatcctcatccaaggtctagaaaactaaacgcatgacccatctctttatccacatatgacatcttctaatacgcatggtgattgatttgttctgtttcaaacattcaggaactactaccgatgcacttcagcgggatgtccagttcgtaaacacattgagacagcagtcgagaacacaaaagcagtaataatcacatacaaaggagtacacaaccacgacatgccggtgcctaagaaacgccatggtcctccaagctcaatgctcgtagctgcagccgctccaacatcaatgagaaccaggacagacgatcaggtgaacattccgacttcaagccagtgctcggtggggcgagaaagtgagaagcagagtaaagaagcattggacgttggtggagagaaagtgatggaatcagctaggactttgttgagcattggattcgaaatcaagcaatgctgattatatgtagtttatgagttttatagagttcatcgactcaattttcgcctccttgttcttgttatataataataataaaaaaccccatgaagattaccaactaaatacgttaacattcgtctgtgtaatgatggtatatgtttattgtgatattaaatcgctaattttagtgaatagcctctggttcgtctagagggtcttctgaaacttgaaagggactaaaagacgagaacaaaaaccctttctctctactctgtgtaaaccctagtgtgttcgtgctctccgatggcgagtcttcgatgctttcgtgagctgagccgccgcgctacgactgttttctccatcaaccagacgcgatcgatctcttcatttcatgggattgagttttccgggaccagcatttctcatgggaccgtaattccgaatcgatctctcactaggaatttgccatggtacagtcattggtatcgctctcaagatcgttgtttctcttcgaacacaaaggatactgatgaagatgaagaaagcagtgaaggagaggatgatgatgaggaggagggggaagactttgaggattcggcggatatggaagtagaaagggaatattcaccggcggagaaagtggaagaggcggaggagatagggtacaaggtgatgggtcctcttaaaccttcggagagacttttcaaaccctatgaaccagtgtttgccattgttcaggtctcgtctctgtgctatctcaattaatcctttagtttcatttctcactctcactgatgctgagtggttatttttatcctgtagattggttcgcatcagtttaaagttagcaatggggactccattttcaccgagaagttgaaattctgtgacatcaatgataaggtatgctagcttcaagctcttcttcgttaatctttgctattcttctctcaaagggctagactttaccgtatctctcgtaagaaggacgaacctttgcatttgtgtttatgatttatgattgttgctaaaacctttctctttatgtccctttgcagttggaactaaccaaggttcttctattgggctcggcaagccagacgattattggtaggcctattttgccagatgcgacagttcatgctgtagttgaagagcatgtaagtgtctcattgacttgcttggtgttttataatactagtgaagctgtgcttaagaataatttacaattgaaaagaggatagatgagagtttgcttgctgaatccggtgactgagagaaactaaatcaaactgtctgctgattagtttgtgaaagtcttgcaagtcattagattagtgttcatctatctctacatcatctgaatgtcttgatttaagatgggcttggaatgtagaaggatctactcatgtaccagcattactcaactagtttttccttgatgcgtgacaggctttggatgaaaaagtgctcattttcaaaaagaaacgaagaaagaattataggagaacgagaggacatcgacaggtatactttataactccttgtttagatagacagtgtgtttatttcatctttgccttcttctagttctttccactgtgttatgattgttgtttttgaccattcaacacttgtgtccaggaattgacgaagttgagaataaccgatatacaaggaattgaaaaaccagaaccgaagatcgtccataagccttcgaaagaagctgttacagaacagacgaaggctgagctagttgcttagagataaaatttgcttctttcttttttgctgatgccgatacatttgaagtaagttaaattatcacttgctgttcactaagaactagattttaaagtcgttgaaatgatgaaaaggccttcttggtagttagtggtaagtaactaggctcctgagatatgaaatgtgatttgcctttcactgtcttgttctccttgctcttcattttgtatttaaactggctcatgcttgtgggagctgtttgttgcttctgtttcagaaataaagatttgcggaaacatctctctccttatcttctctatgctttgtactttgtactgtactactgtggtttggttatggtttaatttacttcttcatgcaagtctcggtcacagatatgaaactggtggtaaattggtaataactgcaagtcacattacactcaaaatctcgattttttccactatgactctttagatcaggtgattattattgtaactatatatggcaaccacttcctcatcaacaaatgattcacagaattgatagtacttggaactgatttataatttcttttatcaacatcggaaaatcgtgtaagaatgccttgaaatatttgaatgtttgtaaatagtatcaaaaccattgtttgtataaatatgtataaagaacttaaacaaaagcaatttggagccaaagagaattataaagctacacgagtacgtaagtccatggttaagatcgggtcgggtggggacgggttggataaaagcaaacaatgagtcaagtaaaagaagaatcatcgtcaacaagagagagagagagataagcacaaacgcggcttttcttctccttataaataagagaagctcagtgcgttactcaaatggccgtcactttggtaacgtccttcgcttcttcgtcttctcgcttccatttccgctcattctcctcttctccgtcgtctctctcctcttgtttcgtccgattccagttcccctctcgccttagactcgcttttgccgtcacgcctctctactcttcttctagagccatggctcatacaatctcacacgctactctcggcctcactcaggctaactccgtcgatcatcctaaggtttgttcctgatcgcttgcagcattattcgattttgctgttatgtgtttaaactcgatactagtgaatgctttgtagattcgtcgctttactgtttccgattaagatgatccactgatttgctgacttcgattatggtcaagtcttgtcagagattagctttcgagtttgaatttttgtggttaattggattctgattagtcgaatttgctgtatcagatctcattttcggggaaggagatcgacgtgacggaatggaaaggtgatatactcgctgttggagtgacggagaaagacatggctaaggatgtgaactccaagttcgaaaacccgattctgaagaagcttgatgctcacttgggtggacttttagctgatgtctcgtctgaggaagatttttctgggaaacctggtcagtcgacagttcttaggcttccgggtcttgggtctaagcgagttggtttgattggtcttggaaaatctgcttcaactccttcggcttttcagagtctcggtgaggctgttgctgcagctgctaaagcttctcaagctagcagtgttgcagttgttctcgcctcctctgagagtgtttctaatgaatctaagctctgttctgcgtcagctatagcttcaggtgttttatttgttgttgttgtggtttcgtctattaaagctcgagaatggttgtttcattaccattttggaactgatcgttatgtggaattgttgtttatttttacaggcacagtgcttggtttgtttgaagacagccggtataagtctgagtcgaagaaaccatcactcaaatctgtagatatcattggctttggctctggacctgaactagagaagaagcttaagtatgctgaacatgtttcttatggcgttattttcgggaaagaactcgttaattctccagccaatgttctcactcctggtgaggattgtttcttgagcatcagtcttagacttttcattttttttttttttaataatgtgagcatcatgtctgttgaagtttatttcaaacatttttctctaatctgctttgtatcttacagccgtactagctgaggaagccttgaatctggcttccatgtacagtgatgtcatgactgccaacatcttgaacgaggagcaatgcaaagagttgaagatgggttcatatcttgctgtagctgctgcttcagctaatccacctcatttcatacatcttatctacaaaccttctagtggccctgttaaaacaaaacttgctcttgttggaaaaggattgacatttgacaggtactagagctgttggcttctgtttgccgcatcaatctctttatttaatacttattagttattgaccagatggtttttgttcacagcggtggctacaacattaaaaccgggcctggctgcttaattgagctcatgaaattcgatatgggaggttcagctgctgttcttggcgctgcaaaagccattggtcaaattaagcctccaggtgttgaggtaagtttatcacacggagcttgcgtttctgagttaaatgaatgtacctaaacaaatgcttcgttgcacaatcaggtgcactttattgtcgcagcttgtgagaatatgataagtggtactggaatgagacctggagatgtcctcacagcctcaaacggaaagacgattgaggtatcataacaccgtttccatatgaattcagcttcaaaaggttcgagctttccattgttagttttacgccaaactaattgtgggtggtattgcaggtcaacaacaccgatgctgaaggtcgactaacacttgcagatgctttagtttatgcttgcaaccagggtgtcgataaggtattgtttcaaagattcttcgacttattaatacattctttctgttggtttttctctcaagtctcaacttgtgaattacaatatttgcaggttgttgaccttgcaacattgactggggcttgtattattgctcttggaacatcaatggcaggtacatagtcttgtgttttaaataagacagaataaaattctttcgtgatggttgactattggtttttctgcaggcatatatacacctagtgataagcttgcaaaggaggtgattgctgcatcagagaggagtggagagaagttatggagaatgcctatggaagagagttactgggagatgatgaagtcaggtgttgcagatatggttaacactggaggccgtgcaggtggatccattaccgcggctcttttcttgaaacaggtgagtatatcataagagtggaaacaaaagaacacatttcaatactgacgctattgttctctaacgaagaaccgggtttggttaatggttgcagtttgtgagcgaggatgttgagtggatgcacatagatatggctggaccagtgtggaacgagaagaagaaagctgcaactgggtttggagttgcgacactagttgagtgggtacagaaccattcttcttcttaagatgaagtctggtgatctctgactgatgtgaactagttgtgtttttgctttgtgtggtgggacaagttttttttttttgtgcaactaagtatgacaagttaaatcaatcagaagattagttttgttgttgtatgcttacctagtctaaacttaaattcaacaaccaccgtgagagacacagttgagccaccgttgttgctgtgtcccgtcatgttgttgtatttgaatgggtccgtgagttgttgagaaggagagatagtcgccgttcatcaccactacagccaccgtgtgtcaccggagagtgacaccacgagtcacaggatgtcaaccgctgtcaccggagtagtcgtagtccatcgccaaggccgttaagggtaaggaaaccctagatctattatgtaacttgctcaggaagtttttggctttctcttatgatctgtgctttgttttggttttgattgttgagctatgagaccttactgccgtgagcttaaaccgcctcatcgagccccgagcagatccaccgagagtaatcgccgagaaaggtaacggcgaaccttatctcccgtgtttgttgttgattattgaaccggatcttaaccagtctaaaccaatgactcttaatttagttaagaccagaaccgaaaccaatgacaatttgcgttgttggtgtattattacgtctgtgtggtgtaactagattataagaatttggtttggtttaattattaaaccaagtctaattaatttaattggaagaataccaaatcaattaatcgagatttctaaatttggtttggttattagattaaatcatgtatttttaattggatttcacctattgatccacaaatgagttacaaaagtgataatactgacgtgtttttcaatttcttttatcacttcgtgtaagaatgccttgaaatatttgaatttctataaatagtatcaaaactatgttttgtataaacaactttaaatttgaaggcaacaaataacagtagtaagtatttcagatatggttatcaagataagtttagtaatagtgaaacatgatcacattaaaatttgaaaagaagtctacagctaatcaagattgttaagatcgggtcggataatagcaatagtgagtgagtcaagtaaaagaataatcatcgtcaacaagacacgacggtcggacgcgggcggacgcaagaagagactgggccactctaattttctaagataactctaatttcatactatatatatatatatatatatatatgtctgcatcagccactctgttcttctccttataaataaatataaagaagctaagctcagtggagacttctcaaatggcggtcactttggtaacgtcatgtgcttcttcttctcgcttccatttccgctctttctcctcttctccgtcgtctctctcctcttgtttcgtacgattccagttgctgtctcgccttagagtctctttcgccatcacgcctctctactgctcttctaaagccacggctcatacaatcgcacacgctactcttggccttactcaggccaactccgtcgatcatcctaaggtttgactttgctgttatgtgtttaaactcgatactagtgaatgctttgtagattcgtcgctttactgtttccgattaagatgatccactgatttgcttacttcgattatggtcaagtcttgtcagagattagctttccagatgcttaactggattctgattactcgagttttctgtatcagatctcattttccgggaaggagattgacgtgactgaatggaaaggtgatatactcgctgttggagtgacggagaaagatatggctaaggatgccaactccaagttcgagaaccccatactgaagaagcttgatgcccacttgggtggacttctagctgatgtctcggctgaggaagatttttctgggaaacctggccagtcaacagttcttaggcttccgggtctcggctcaaagcgggtcggtttgattggtcttggaaaatctgcttcaaccccttcggcttttcagagtcttggtgaggctgttgctgcagctgctaaagcttctcaagctagcagtgttgcagttgttctcgcctcctctgagagtttttctgatgaatctaagctcagttctgcttcagatatagcttcaggttgtgatttcttttagtaaaccttgagaagtgcttgtttcattaccatttttgaactgatccttttgtggaatcgttttttacttttgacaggcacagtgcttggtttgtttgaagacagtcggtataagtctgagtcaaagaaaccatctctcaaatctgtagtattcattggctttggcactggacctgaactagagaacaagcttaagtatgctgaacatgtttcttatggcgtaattttcacgaaagaacttgttaattcaccagccaatgttctctcccctggtatggattataatcatactcttagacttctcatgttttttataatgtgagcatcatgtctattgaagtttatttcaaacatttgactctaatctgctttgtatcttacagccgtactagctgaggaagcctcgaatctggcttccatgtacagtaatgtcatgactgcaaacatcttgaaagaggagcaatgcaaagaattgaagatgggttcatatcttgctgtagctgctgcttcagctaatccacctcatttcatccaccttatctacaaaccttctagtggccctgttaaaaccaaacttgctcttgttggaaaaggattgacatttgacaggtactcgcaagagctgttgtcttctgtttgccgcatcaatctctttcttttatacttattggttattgaccatctggtttttgttcacagcggtggctacaacattaaaattgggcctgaattaataattgagctcatgaaaatcgatgtgggaggttcagctgctgttcttggcgctgcaaaagccattggtgaaattaagcctcccggtgttgaggtaagtttatcacacggagcttgagtttctgagttaagtgaatgtacctgaacaaatgcttctttgcacaattaggtgcactttattgtcgcagcttgtgagaatatgataagtggtaccggaatgagacctggagatgtcatcacagcctcaaacgggaagacaattgaggtatcattacaccgtttccatatgaattcagcttcgaaaggttcaagctttccattgttagtgttgcaggtcaacgacaccgattctgaaggtcggctaacacttgcagatgctctagtttatgcttgcaaccagggtgtcgataaggtattgtttcaaagattcttccccttatcaataacattctttctgctgggttttctctcaacttgtgaatcatatatatttgcagattgttgacattgcaacattgaccggggagattattgttgctcttggaccatcaatggcaggtacatagtcttgtgtataaaatagacagaatgacattctttcgtgatgattgaatattggtttcgatttttgatttctgcaggcatgtacacagctagtgatgagcttgccaaggaggtaattgctgcatcacagaggagtggagagaagttatggagaatgcctatggaagagagttattgggagatgatgaagtcaggtgttgcagatatggttaactttggaggccgtgcaggtggatccatcaccgcagctctctttttgaaacgggtgaggataccataagagtggaaacaaaaaaacacacttcaatactgattctattgttctctaacgaagaaccggatttggttaatggttgcagtttgttagcgagaatgttgagtggttgcacatagatatggctggacgggtgtggaacgagaagaagaaagctgcgactgggtttggagttgcgacacttgttgagtgggtacagaacaattcttcttaagatgtaggcaggtgatctttgtgctcccagttcttatttaacattctcagaggttttaatgtaggtaaaagggtttttatttgcttgtgtgaactgtgaagtgtgacgcttgaatatgacgagttacccatttgaaagtatttgactatttgtagatattcttgtgttccgtaacatcacttacctaataacacaaactattaggagcacaagatgaaggatacaagtcgtcaatcttatgtttcagtggtcatcaataataacacaaactattaggagcaaacaaaacaatttatttaaatctcttttgaatatgttttagctcaaatcaataaataaaggcgccgagaaaaaaacagagctcatttgcacaacaatcagtatagtccaaagcttaagcaagtgaggacatgtgttctagctttcctcttgagcaggagcagaaacaggaggagtaggttcaagcattcttacagaacgaggaagcataaactcagcaaacacagggtagtgagatgaaggatacaagtcgtcaatcttatcatttacgatctcgcacattacaggaactatagatctacctctgtaaagtatccaatccgtgtgtagatcttgcgtctgtcggtcccagcagaggcataacgctctgaatatcagcttcaggaactcgaccgttccctgcttgtcacctgaacaaaggcccaacatgttatgatctagaagctttggagataaatgatttttatagctcatgagagggtggaatgtttcacacctttgaaatcatggtatgttcttatgagagcgacgttttttcttactcgggcacttggccatgcgtctctcatatctcctaccacaccatgctctctgcaagttgaatgatgcccaaaagccattcatcagcagtcaaataagtaaatatgctttgatttgaaactagttgatcagtgtgtgaagaatggtttagccattcttgcattaactaggagccctgaaagaaaactctaggagattggtaaaaagcacaaaacttgtgaatgtgatattaaggtacctagatctgcccaacagaaaccgccctgttgttgattccttctgtgtgttgaatcctccacagtacacaaccggcaaagtgggaggtaatgatgctatgtgttgccatgtgagtaaagcacttcgcctacgggcacgagggctgatttcatccaagtttgtgttgactatctgaaacgaaaaaccaggcggctccgctcctttaagttggaatgtgtaggcagcttgtcaaagaaaaccaaaatactgatatataggacaaaaacaccaaaatcataaactaatctaattatagtttaactaaaatgaacccaactagtaaaaaggatatagcccatgtcgctatacaaggaactgcggaaccccatgccgtgcttccagggaccgagggagactctgacaaccaaaaagttccaccctctagcagctctaccttcaattagtataaagtatagtatcaagcagcgtattaattatttagagcgtagttatgtattgtcttatcaaccgaattaatactttttccttgttgaagaagatggtgcagtgttcatcattagcatccccaggtcctgttcttgatatgccaaattgatcataggctgcaagcaaagagtactaccatctatttaagttcaaagaaacaatgcaaactgaagtattattaaggcatgtgaaactagaagctaagctccatggttcacagtaacaaaaaccagataaacaataccaccatcatttcaaagaaagcacctgtaaatgtgagaatatcatgcattccattgccataaaacagatgcattaagtgcactagactccggcttttgtagcctaaaaacactaacttgaacttgatgcaaaaaaggatacggattgacaaattggctatcagatttaagcaataccaacatatactaaaaatagaattaaatctagtagatcacaaatagatttacatagtagattgagaacaagaagagtggtctacgattgataacaagattcacactagtctgtgaacttaagaagaagcagactgctgtatacaaacagggttcaattagacctaactcacaccatttaagtagagattagacttccataaatcaaagagaattcaattatacctggcaacccctgctgaagataatccaactgcgacttcacacctaaccaatgtaaacatgataacaaaagatcaaaacgaaaatcctatctctgttcaatatttcagaaggcaagaaaaagcacaagaatcaatctccagcattcaggaaaaagaagccttcttggagaaccaatataaagaaggaagcaagatctaacaagcattgaatcaccaatacgaagaaggaatcaaagatctaacaagcattgatccattgtggctaaagattattaccttgttgggtacagagaacaatgggggagtaactagtgatgacagtgagacacaaatctttccttttgagccatgaattagggctttcttcaggtagatcatcgtgaagattgaatgacatcacactcaaagacacactcattgttttgtctcctttcttcttcttcttcttcctctagttttctctcttctttctttatggtttggtaagacgaataaaaacaaaggtctctctcacatcagcagcagctcatcgtcgtcgtgacctacatgattttcaataataagtcaaaagcttatcaatttttatgtgaaaaaacagctcaggattcgaagaaagaaaatcaatcaacataatttattatattatattattgaggaatccaatacgaaccttgttgtttcagactcttatcaacaacaacagtggagaaaatgagtcttggacatttgacgacttttgctggaaaatctgtgaaagtcatgccctttgatcaccaaaagtctcttaaagccatttcctgatacatgtataaatcagcaacttcagaaacaaatcaaatcggaaacgggggaagaagaagaagaagagtaactaatcggaggagggaccggtgaagtcacggtggagggaccggtggagtcacggtggactaatcgtcggctttttggtctctctctagatttttttaaggtttaaaattaatttcagacaagcttcgaacccgagacatggaacccctacagacacgtgagtttttaataaccgttcagaccaaacaggagtaacaacaactgtttgagatagttttgttgaataaccgaattaaaccaaagtgaatacaaaaccgaaccgagatttatatttgtaaagatacgacgacgcctttgacgaaaaaggagacgaagaagatccaaacacggcgctaagctaagctccgttctcctcctcaaaactatccgacaaaagacagaagcagaaacctaaccctaatttccttttctcaaaatccccgaaaggtccgtctctctctctatctatctctctaacttagctctcctccaaattcggatgattacccattacgaatttgcagagaagaacaaatcctctctttcttcttcctccgtctctctacccctttcatgtcttctcaagtctacgactctcatccagggttgttggtgcatcaaaccctagtttttgatttcgcttttgagatttctcatgcttctttcgtttcggatctctctctgaatcagattacgtcttttgggctcttgttgttgttgtgctgctcttcaatctcttctccgttgcgttctatgtgccaaatatgagtgaaaagaaggtaatttcctactacttgttgtttgcctcttgagtttcttcacttattttgtttcccttaaggtttagttctcatggtctagagaacgatgcagaggtcacccaattgcaatagagactagttttaggtggtttagtttcatggagatagtatctttttatagcttcgttttgatcattttgtagtttttctctgaggtcaatgtatatccgagagacttaactttcattatcatttggtttcttaattgttctgtaaatgattctcctttgaaacttacatttgctattctacttttattcatggcaggtatttgtgtttggatcctttacagaacatgaaactaggtcattttttgagcagaaacccactaaggatcctcagaattctaaagacaagtgtgtgggaagtattcaatttggctccttgaatcttgctgcggaaaattcttcagtaaatactaatggcgagttgaagaaaggtgaggctgatgggacagttaaatctgctgggtctcaagagagacttgatgcttctagacctgccagctcggataagaacaatgatagtgatgcaaaactcccaagaaagaactctttgagagttccagagcatgtggtacaaaatggaatcataaaagagatctctgaaagcaacaaatctctcaacaatggtgtggcggtgaaaacagatcctattggtttggataacttgtctatgtctgatggtgaaagtgatcctgtgtataaagcttcgagctctaaatttcaagcgctggacaatgaagatttctcaagtgactcttcgtctggaagcattcaaagaaagaaaaacctgaaggttcctactgaatctgttccacctgttaaagactttacaccaagaggattaataaacgctggaaacttgtgcttcctgaatgcaacactacaagcgttgctttcatgttctccttttgtgcagctcctccagaaaattcaactccaagatattccaaaggtttttaacgtacattgttccttttgtgattttggttctatttcctataatatttgttttcttatcgatattcttccattttcttttttatcaggctgactctccaaccttagctgcattttccgagttcatctccgaattggatgtgccaagcagttccagcatcagaaataacgttactgttgttgaggctggtagaccttttagacctgccatgttcgaaggagtccttagaaattttaccccagatgtactcaacaacatgtctggtaggccaaggttagtgactcccttacacagtctaaattttgatggttcctctgttttaaatagttcatatgtatgtccctattctaactttgtgtgcatgtactggcaggcaggaagatgctcaagagtttttgagttttataatggaccaaatgcatgatgagttgttgaaactcaaggaacagtcccccaaagtcaccgcttctaagtcatcggttatttcttctgccaacgatgatggtgatgaatgggaaacagttggacccaaaaacaaatcagctgtgacaagaacacaaagttttgttccgtctgagcttagtgagatatttggcgggcagcttaaaagcgtagtgaaggcaaaaggtatttgtattttttgtaatcattctaaatttctttcatgatagaattttctcatatgtcatttatggtacaggaactaaagcttcggctactgtacagccgtatctcttgctacaccttgatattcatccggacggtgtgcaaggaatagaagacgcgttgcatttgttttctgcccaagaagatcttgaaggatatagagcctcggttactgggaaggtaaactatttctctttttactatattgaagctgtgggattttaggacccaaaatatttcttatggatttcaaataataatttgcctcgttacttgtttggattctctcatttcagactggtgtagtgagtgctagtaagtcgataaagatacagaaactctcaaagataatgatactgcacctaatgcgttttagctacggaagccaagggagtactaagctgcgtaaaggcgttaaatttccccttgaactcaacttaaaccgcagccatcttgtttctctatccaatgaggtataaagccgaagcagaactgtctatgtttcacatttctcttactctctatgtgatatccctctgttgtgaactagtcaaatttcttcttgtagagtttgagatatgaacttgtggcaacaattacccaccacggatgggatccctcaaaaggacactacaccacagatgctcgacgaaagaatggtcaatggctaaggtttgatgatgcctctgtgacccccatagggacaaaactggtgttgcacgatcaagcctatgtcctcttctacaagcaagtgtaagagattcaaaggcagcagatttccatggtcggagaaagaagagtaaactctttatcggcttgtgtccggtcttctgagtttaagtcacgatgctataatctggttctcatcttatataactttgaaggagggggtctcagtaggtaaatagttttagagtacctggtttacactggaagttttgttatgattccttgagatgggtgttttaatctgattttactacttcatagacttattattcgaaaattcatgtcttatgctacatgtcttcttatcattggcctaatcttccttttcatggttcaatcaatcaagtagaaggcgatgaaatgacaaactggtttaaagattcggtttttattctagatcatggaatttagagattcaataagtactctggatccttggttagtgatccagttaattattctagatcatagtttagagagccggttaattaatctaaatcatggtttagaaatctggttgtttactcaaaatcatggtttagtgataaagttttcctctttcgaatcttaaacaaggaaaataaatttatttcattcaacatattagagattacaagagtacatttcaaacccttagctctcaagttctggtcccaaatctcatggcacaacgtaacctgccacattaggaacatcaaaacattacgatcatcatgttaatacaaaaaaatgtatcaaagatttacaagttttgtaatattttttttgcaaaatacaaacaatcacaacatagctctagcgagaccttcaatttttacaagattaaaatcataaaagaagaaaacttcttaatatatatatagacttacttccacacttggtaccatgagcgagaggcttcccacaaaaggcagtgacatgaacaaccttatccatgtctatcatttgttgcaccgaagctgtgatacggccacatgcgcaagggatgtctgatctcttaaccactctgcagcacgcttcggacgggtttacctttgggcctggacgctgcacgtagacggcgcattctttcatcagaccttcgatgtctccttggcacgttccttgccctggaactggtagtgttcctgagatcacaaggatcattgttagaccaatcaaagcacgagaaccgatcaccattttagtttgaatctagtgagagtatctttgagtttttggttgaagagaagttgtttaggggtcttatatagtggctttggaggttttaagggtttgtgttgcatgcgaggttatcttcttcttttttttctttcttttatgatgagacttaattagtttgatttttccaattggtttcatgtgacaaaagacttgaatttttctaagagattctgaagatgtttcctcgtaactacaactacatggcagccaatgcatgaaacttatatgttatgaaattaatgtactattgatagataagtaaacgacaaacaaatccaaagatgaaccaaagggacaagctattttaattatcaaaacatatcaattttcttcaaaagtatttattgtaccaagtgaatgatatgtttcttactttggattctccctgttattcaagaaaatacattcctttaaatttagtaaaacaaatctacaacttttaatttaactgaagaaagaaaataaagagaggcgcttcgaatctttatcattgctattaacttcatcaaaactgtatataaagatctcgcactctcatgacagaacaaattatttgatataaccaaacagaacaaaacaaattctataaatactacaataatcataatacaaaatcgctattacttgctttgtaatcgcataaaaaatcttggagaatacaaaatcgcgtttcttacttgctttgtaatcgcgctcagcatttgcgtcgagctttacggttttgacgtcgtgagggttctccgttccaccgcagattcaccggaaaatcgaaccgtcgaattggttcccaagaaaatctctttccatgagtccctttacgtgtcaatctccgaagataaagtcaatgaatggcctctgcaagactatttctatcgagatacttgccctaacgcgaaggtaaccgttggtaaagcaatccgagaaatctacaaggccaaactaagtatcgcgccgtctctcatccggctcctctttcacgattgtttcatcgatgtcagatttttcttactttctcttgatgcattgagttttctttggaaattggcttagtcaatcgattcatgtatgttaaatctgactcaaattagcatttcttggaagttactgtagtagaatcttaatttctaggtcttagccactgatatgcagaaataaggggtttgattctttgttattagagtcaaattcagctcttgttggagttgtgttctattattacccaaaaaagccgccaaagcaatttccaaatgtgaacagaacaaacatgagagtacaaaaaaaagaattagtggcaaggcgtaaactgagtcctaaaaaagagaagagttggaggtaaggcgtaaactaaaaaggacaaaaattggaggcaaagtgttgcaaggatggacctgtacccatagaagatcactcctagtgtccatgtggagaagctatatgattggtgggctgcctattgatatgtttaccaagaaaattgttggtatgttaggggaaagttatgcaatgatacattgatacctctagtcgccttgcaagtagtctagacgggcgatagaggcttcgtctatatgggagatatatacttggatccaaatctgttccctaaaaaaacaagaaacaatagagactatcttgagatcattgtgttttggctttaactcatcatcattcatcatacgaattccatgatgggactattgacgtgtggaacaagtaacggctgagagaagttgattatttccttttttttttattgatcgataagtttaaaaagatatatacaaatacaaatacaaataggaaaaaccttatcaccgattctcctcctctatatataaagacctaataagcacaaactctttcttcacaatcaaatctcgatctattacaccataaaccctaacgagtctgtctcttttgattcacaactatggtgaaagcttcagcaacaatcatcattcttttgatcttgttctgttctttggcttgtgaggcacgtgttcgtctcattagtcctgatcttctgactcacaaagtcgagaaacttcaacaacctgatcttccgactcacaaagtcgagaaacttcaacaacaacaaaaacgtatctcgaatcctgatcctcgcaccattgaggcacatatcgaactcatggagtcttatgagtctttctacccacattccacgatgatccgtcacgtcgtgatctaaaacccgaccttgtattctctgtaacttttgtatttttctgtaacaaaaacaaaaaaggggactaggccgacccttaaacaactggtcgtgatctgaaacccgatcacctgatgagctcaaggtagagcgaaaccagtcacatgatgattcttgatacttagaataaataaaaagaatataccggcaagttagtacagtttcaatatagtttatggacgaggttcgaaattttatggtttacctttttgtttttccctcttgtttggggagtttatattagatagaatcatggagttcaatttgtcacgacgtttttgtctagtaagattaggtgaagtaacgtaaaacaaaacattgaaacattgaagttatacaattggcgagcctaagcttcagttacaagcagaaaatctaaaaaaacaacacatggcttattatacatatgcacttcatcagtttcagatctctctctctctctctagacaaaggtcaaagggacacacactagaatagaagtcattcaccccaaactaacttgaatatattcttactagctgatgcacatattacattgttgcttctatttctcaacatctcttcttgcgccgagacatctgcttccttcaaaacagcgcagagattgttttagttcaagtcagactagaaggtcaacagtttcctcctaaagaagaagtacaaggatttcgagatcttaggaaaaggcaataattcttactagatgagaataggcagaagcaagagacaaaagcgttgggtacatatcaagaaccgctatggcaatttcctccgttacctgcgggacctgcaacagaaggttttggaaaagttgcagagaacttatcagtcgaattggatcctcacatataagaaccaaataaggcttagcaggactcgtacctgcattagctgaatggcaaatacatcgctgattgtcattttatcaaggtcttgacaccttttgacaaaactatcaaaagaaggacatgaggctgcgcctttgctctggtcattatcattcacccgtaacttgtagtattgatatattgatttcgtgaggtagccgtattttcttagcgtctcacccagcccgtgtgtcctcagcacatcaaatccctccagaatctctgtcgtgaaacaactagaagcacatacaaaggatgacaagtttggttccaaatctcaacgaaaaatgcacaaccaatcaaaatattgcgttataaagataatcttacgctgttttaatgctttctgctgcatcagaatggtttggatccccttcaagaatgtatatgagcttcttgaatcccgatctctatttagattttcattttaagaaaacaataagaaacaaccatcaacaaaagatggagcaagtcaaaaacttaggagttgagagtacacacacctgaagtctaagtttttggtctctgtagcgattatctctaattgatgagcgcatatcatcaacgttcttcctctcagcaataaagtctagaacatattcagtctcaaggtacttatgccgagcaatccatatacaatccccgactggtaatcgtctaacctacagattcaacacaaattttccaattattctccgtaattccgaatctgttgacatctatccaagaaatcaaatgcaaacctcaatcttgatgttgaattcagagcatatgttttcaactatattcctggatcgtgatctgtgaaataagaaggtatggattagtgttcattaacaatatggtagctaggctactatcacactttcataaccaaaccataagaaacctcaaaataattaaataaataaaagagtagcgtaagataaaattttccacaaaccctttggtggcaaacttttctcgatcatccagtatcaagatcacatcatatgcttcctcaaacgtttctccaaattgaagaggagggaggcgtggaatatttgttattcctttggttccatctgatgccaactatataaccaggacgcccaataaagaacaatgaaagctgattagcaactactgatcattataatatatagctaataatctactgaactcaaatggttacatacagaagatgagcaggctttcacagcatgacttgaacctgatgaacatggatttaaggtggatccatcattgcaagagcggaacttcttagcacgagatccctcaagatcaacttgacctgtatttgtagctaagacttcataagatgaaacatgcaacttttcacaaacacagcactaagcacagtatatcataaagaccgtacgaatttgtgatttaaaaggtcctgatgaatcctttttactatttctcgagtccggacaggaattataaacctctgcttgacgaagatggcacattacagagagccagagagttgatggatctttgtccccagatccatctgaaacctctctgaatgcagcaacgacttgttccttcgaataaccaaacggagtaaactgttgaagaaaaccaataattttaaacaaaaaattaatactggagaaaaagatgtcacctcgcccccataattttaaaccaatcaacaccgtataagaagaattaaaggtccaaataacattatgatggagtaccttttcaagaatatcgcttggaatggctgattgtgccctacatcttggatcgacatatggaagttcttctctcatggtaaacgaacaggtgggattttgattaggtgttttctttgcttgcggtgtaggatccatttcatcaacagataagatatcaactgaatcaggtaatccagatcgcaggatacactcatttgcaacttcccgaccttcaactgtcagcatgtacctaagataagaaacaatgaagtctcaagataagttctacttcttcacaaaaaatacaagtcaagggcaccataaggcagagtttcagataagagcttttactttgctgggttgctagatttcaccactaatcccttctgtataagagtggtcatgcagctccatccactataccactccctcttagagtgtccaagtcctgctttccctttccctttctctggcctagtcaaaactcacacgaaatggaagaataagacatacagcagaggttgggtacaaaaccaatatattagaaactgggaacatcacgattgattcatacccaacaggagcgtgtgatagcccattcgcgtcagcagcatcaataagctcttgtttacgcatgaattctttcccatttgtagtccttctggtaacacgaaaaaacaaaaacggtactgaagaagggtttacagaggggaaagaaagagtattttgtgagtaacataaacatgtaactaacctgtgcaacgttattagtaatgcatatcccactgaatttctttgcggaatgtaccgtttttttccattggcctttttccctggacaggttaaaaatcagcatacataaagacattacattgataatacatgtgtacaatgtgatatagatacagccaacagcccaacaccactaccagcacgattatcaggtaaatcttcttgctcagaactttcaacagcagtatcaaaatatcctttcatgagcttaaccatccacttgccaaagcccctatgcaatcaagaaacagacacttggttggatagaagcaaagccacccaaaaaattaaaaccactcacaatcagatcagctttgcatttaaaaaggcttaagaaactaaaatgaatataaacaaacacttgcccttgaaacaaagaaaccactcactatcagattcactgatttcacaaggataagaaacacgcatattgtctaattttatctacatgacttcaacttcagataaaacaaacacaaacccttagccaaagcctgaattaacgggaaccaaaaacgtatgtgaactgtaggtaataaagatacaattgatataccgaggagcatcttattactttcttagtcgctaaattcattccaccattcactcaatactgaaaagggggagaatttcgaaccagaaacacaaaaaggtcacatctttttccaccattgcgaaaaaagggcacctcaaacaagaaaccaatgacccaataacccatatcccaataagaagagtagaaaaccaaattccataggagaaaagaggagcgaaagaaagcaagaaacatacttgatctgcgacaagtctttgagtgtgttaatgggatccttggcgtcgcagacactcctataccccttaacaaatgtcctctccagattttccgacaagcctttgggcttttctgcgtattcttgcttcttctgcaacacataagccgctaaacctcggttctcagggcacagtacccgtctctcgtcatccatcactacccactccaaatagtttcaatttatcaagcgatcataaaattccttgctgattggatatactcgttgccgaaaaagagggaaattctctcgcaaaggtttgatctttggttcgccggagaagaggaataagcactttcagtttttaggcgttttgttgagaatttttaaaaaatggggattttgactaaaaccttctcttgccgaagagtaagtctccgtttcatacggagacttctggtttaaatcatatcaatttggaacaaatcttttaaaccagtacaataattagtattcgactttgaaacatgtcattcacttggttcgttaaagacttttgatgaaaaatttatgttcgataattaggatagctaccatgtagttgtcacaatttgtcacttggttcatctttgggttttactattttgttgtttacttatctatcaataatacattaatttcatattttcatcaaacaacaaagtcgagaaacttcaacaacaacaaagacgtatcccgaaacctgatcctcgcaccattgaggtacatatcgaattcatggagtcttatgagtctttctacccacattccacgatgatccgtaacgtcgtgatctgcaacccgaccttgtattctctgtaacttttgtattttctgtaataaaaacaaaaaaaggggactaggccgacccttaatcaactggtcgtgatctgaaactcgatcacctgatgagctcaaggcagagcgaaaccagtcacatgatgaaacttgatacttagattgctatagcgattttgtaatatgattgtagtctttatataatttgttttcttctgtttggttatatcaaaaaatttgttctgtcgaattttctgccatgatagtgcgagatctttagatagttttttttaagggaatgtattttcttaaatcagattcaaatttgacaagggttaaataataattgtgttgtaatggaactgaaagaatgtatggtataaccgaccggtctatcccgtggcttcagctagcagttatacaattgtgggcctaagcttcggttacaagcacgattggttctatatctccacagagattactagataacgacaacagacaaactatcaaagcacattgtttatagatattttgcagctaatcttgctgcggtttacgggctataggtcggtgaaacaatcttctgcgttttgctccccaagatacaaccaaacagtttggttctttcctctttgtcccaagataaccttgacagttttcagaaccacaattgcactttacttcaggaccaaactgcacaaatctgccattacacaaagagagaagctaatatatcagaatctcagattacttaggctaattataagcacataaaagaaacaaatggtcaagaacttgacctgtagtcatatgtaagtggctctcctgcttctatttgacgagctgcaaagacacccacacgggtctcaccttcaacttgcctgttagaacaaaataatcaaactgactcatgctctcttactcgagcatcatcgacatatttatatgaaataatatatgctttaccacttttccaatacacagtttgggttgcaactgtggttcagaaaccgagaggcgttccctttgaaggtagcatcaatcgtgaagtctttttgaatctcacacatgtaaaagtctttcatgcctttgtgtttcatatcccaaagcctttgctcacattgagcatcactaatcactgtggatagagtgaaaacaaatcactaaaaactctgtcgctttccaccacaaacataaggctcaaagaccaaatcaagatagtttaccttcaccaatgtattcgacaatgaagtcctctttgttgattgattctgctgcctcaactccccaaccgcaatgttcagtctgtaaaaccaataacatgacatgtcaagataaaaaaacacaagaagagtgtaatgcaagaatcataaactagagactagttttaccttaacaattttgatctttttctctttgcggaatggtctgtttccacaactttcaggacagctgcatccctttgaacagcttatgcattgaaccctgagagaaatttttcaaaacggaaactattcaaaacgaaatgaatgttaacagagaaaatttgtttggttaattaacaaatatacctgcaaacacagcttctatcgcaattagggccacaatttgtgcacccaacaccatcattagcattatcacgctttttcttaacgaggtaaatatcttaactcagtcaaggaaaagacacactaatgttgtgaaaaaatgagaattatgtacttttaaggcagaaatattgaatgtggaaactataaaggatactgcgtctaatgtgcacataagaaggcggatcttccttcacaacagaatctttccatgctaagtcaatcttaaactcctcttccacatatggcaaaggcaactggcaaaagacttcctgaataagaaagtagataaacattcagtgcctagctcttgaaattgtgtaagataaaaacaaaatatccagctttcaaatctcttccctctttttgattttcgagcggcaagtctatgtaagaattagtttcctttactacagtcacatttggcacgtggcaaagaaacactgacctcaatctcactctgtgcaactgcatgctgctcaatcaacagagattttgtcagtcctgtgagtaaaactctatgaaagtacaaatcgtaagaagcttcaagaagtatcttatgaaagcggtaaactaaaaaatcaacctttgtgtctagccgccaatcagttggatgcctccaacaaactgctcttcctggttggtcttttaagtgaagtatttcttttgaccatggagaatgtttatcatgagcagccattggacacttaacacaccgccattgtgttctttgcttgcagacaaagcactcctgcatactccattctatcagaaactgaatgataccacacaatcaaaataatccatttcaattccctacctaaacactattacttagaactaactgttaagtatatcctatttgatggcctatcgtctctctgagcatttctaccaaaaataagagcaacaaaatatgatttgcttcattgaatacaaagccagccaataaaaatgaagagaaatcttccttagttctaaacaataaatgaggatcttacatgttgagggcatttaaatttgcttgacttagaaaaaccaagactttctttcgcacaaagcgagtgataagcgccttggcagccgcgaacagaacacgataagtcttcccccgggtacaccggcttatggcaaacaagacaatcaacctgacaccaaatcccatatagtcattatgtcaataaatctaataacttagtcactaattgacttgaagattcgaatgactttaaaagtaaactagtagtcaaacaatatctaaatgaatatgagatcttacacggacatcactaaagccaaaaaaaggtgatgaattcaattcacagatgcaatatacttcaaacaaacttcataactcaagatattatgtatatcctaaaatccaaatcccatgtagtctatatgtcaataaatctaaaaacttcacaagtcattaatttgacataacaaacaacataccattttcttggcaccaacaagaaaaggaaggaaacatgtcgactctgaaacaccagaagccactcttctcttgacccaatccttcacatgatcatccaagacaaaccctttcttgactctgtcagacggattctgtttccgggtaaaagcagtgactccattagcaattttaatgtccttgacctcttcctccggtggaatcattggtaaatgtttcccattgcattctccggctagattttccggggaattgatagatttggctaattcagggcctgaagccgccggaagaaaagaagggcaacaagtgagagcaacagatgcagacatagacatgtttcccagatctaacatcctaaactcgaaagtacaaaagatggaagagtaagaagaagaagacagttacgttttgtctttgttgggtaggcgaaaagcgaagagacatgaaaaaatatggagggaatttaaggcgggagatttgtcctaaaatattatacaaaaaggtccttgtattttaaatattgttttaattgcccccaaacattttttctgctagttaaatttctttaccaactaaaatcccccacattcatatctaccaataacagtgctacacgcaatgattaatgccggttcccaaaacggaactgaacaaatagctaaaattaatcaaatcatgatttgaaagtatatcgtattgatcagtgttcggtttgttagttataaacaagatatttcgttttcgtttttggatatgtttacatgtcattttaggttcgttatgtcacaacttaaatcaaattatatgctttctaggtatgttttaattaattactctcttttttttatcatacatctttacagactcacgaaaaatgatctatgatttcatctagtgaaagataaatggattaatcagtttgtataacatcttaatttcgtttttttttttcatttcgttagtgtctattgtctaaatttcgataattcagttttcatttgattactatactcaaacaaaatacctagcgtaaattgctttgttagaccatatttagcaacaaaatctaataaagtattgatctttgagtctaggtttccacagttcaccacgcaatactcacctttctttatacactttacaaagataatgagtaatcgttaaataatccaaagaatttactcatccatgtacacatagtttatacttaatcctcttagcaagaaattatggcgtctaagaatcgatttagatgaaaaacggaccaactaagcaaactagaatatatgttcacttcacgacaactttgtatataattatacacaaaacaatatacattcattttgtatgatatacaacaaatcttttgaaaatactacactcttttctttaatgtatttttaggctaatgttgaaatattcttgtatttatattatgaaatttgaattagaccggatcaaaccggatccacgttatcttgattttaaaatgaagaactccaaataaatctagattacaaactgattatcatttgctaaaaagatcctaaaggttatcatttgagattcagcaggcgaacaacaaaaattattactatattcgtacggttccattcgatttttgttcactcatttgttgttactacactttactactcaaaatttgttaccctcgtttagtccgattcgatggttcctcatcgttcattgcggtgaattactatgaaagtacaaattaaaaataatctgaaacattgatgataacaatgtagcaatgtagtcgtaacatgccaacatcgaattctgggccaactatattttgctttggtaagcgaaccattcattcagtttttaattattatatccaattgtttgacgcgttttaaataaatcaataacataatccatgttcataccaattaaatatagatatgtatgtacgtgttgtcttgtcttatgaatcaaccctccttggagaatcttatgccataaagccaataaaaagttacctactctttcaatttacctcgttcgtttaatctgttttgatcaacactccccatattatcaaatcatttaggaaacgtataaatgaaacgaaaatatatgttttagttactcaacaatgttattaagggtcaggcaacaaaaaaatcttgaggggtaaaaacaaagttctcgatttaataattatagactataggtttaaacagagacccacaaattctgcatttctcaccttccaactgtaactttaatatttgtttcaaattgacacggcgggtaaaaataatcaggtgtatcctccctcacactaaggcgaaactaacatactaataaggaagagacacgtgtaaaaaagaccggtcaaagacgctacgtagataaaagtcacgaagcttgctcgtttttaaaattcaaagaggtttcatctccgtataagtaggcgacgaagcataccacgaagatcgaaaaaaaacaaatcagattctcaaatactgaaaataaaaagaagaagagagaaatctacggtggtgggtgattcgccggagttcaatttcgtagctagatttctcctccttttccccccgacgagctgtgcgagagagggaggggaatcatgcagaaacggagaacggtgaaggaatctacgaagataagaaatggtaaaggtatggattccggcgaaaagaagagatctgagaagagattgatgaagttcgaggagttacctaggtatttgaaagataacgagttcatacacaatcattatcgatgtgagtggtcaatcaaagaaactttcctcagcgctttctcatggcacaatgagactctcaacatctggacgtatgttttcgttttcttctgatttttttttcccttggttgaaaatttgtaaacggggttttgaaatttggcaggcatttgtgtggatttgcgatatttacttggatgatggttgtgagttcaatggagacgacggagcttggcctcgccggctttgttagccttctctccgggtaagaaaaatctcgaggtcaaaatcgtcattttttgttttgaggaaaattaaacaaatttcaatctttttgggggatttgtgggtcctaatgacagagcaacaattcgctggccatggccgtcaatggcaatgtcaaaagatgtttacttctccagcgatcaaactctgcatcacgtaaagattcttccttttttattctgtgacattgtttattctaatttaagtagtagacatgcaacataagtgctttcaaataacaaatcccatttttgttgtgtgctgattgcaattagcagtagtgctaaatggtaactttcacccaccatgtcatgttctctttggattttttctatctttctgtttttaactttggtttttatggatacttcagtttctctagacttgctctttatgctcacctactttgaaatcacgtgatttcctaccgaaattaaggaacaaactttatgattggatttgtttagtttagcataaatcttgtaacctgccccaactatttgatgtttctctcactttagttttctgtagattttctttgtgctcacctaactttccaactaacatgattttttcaacgggtttaagaaaagaaaggctgtttttttgtcaacataaacttatgatttggtggtgtctactggcaggacttaaacgtgacacacactcgctcgctcctgaattctcaaggagatgttaactacgaagccattccgaaatggccatggcttgtgttcttgaccggagcaatgggctgcttgatctgcagttccatgtcacacctcttcgcctgtcactccagacggttcaacctcttcttctggcgtctagactacgctggaatctccctcatgatcgtctgttcattcttcgcacctatctactatgcattctcatgccacacttactggcgactcttctacctctcatcgatctcaatcctcggtctcctcgccatcttcactctcctctctccatcactctcagctccacgtttcagatctttcagagcagctctgttcctaacaatgggattttctggcgtaataccagccacacatgtgctttaccttcataaggatcacccaaacgtgcttatagctctcgtatatgaacttgcgatggctgtgttgtatgcaacaggagcagcgttttatgttacccgcatacctgaaagatggaagcctggggcttttgatattgcaggacatagccatcagatattccatgtgtttgtagtcttaggagctcttgctcatagtgttgccagtcttcttatcatggattttcgacgggcttctccttcttgtgccttttaactcgaaaacacattgtaaaacatttagtaatacttcattcaatgtatcaatgtatgtttgtccccatagaagacgcaatgtaccatccaagatattcaaaagtaaacaaaaactcaatttcctacaagtattgttcaagcttcatgatacaaagatctaatctaattgattctttctgaaagataaagcagagctatatatagaaggaatcaaggaacctctaatcagttgaatcattggaaaatgaaagggcgaggaagatacagagaggaacaacaagaaaagcagcaatcttcaacaattcctctgtttctttggagatcacacctattcttgaccaatcaccactatacctgaagagattttaagaacactatactataagtattaaataactctgcaattctcgctctttgagtgctaaaaatcttacccagcatcgatgaatcccaaactcagaacagcgatcgcagatcgagcgacgattgtgttggggactttgattcgcaagatgggtcgttcttcgtttgatttctctgaaaagtctctccttttcgacattatcgtgacgccattagcaaagcttcggagtttgttgtcgttaggacagaatgagacgaagctactgtgttgtaaggtcagcattttcacttttcccggaatgagagattatcagactttacatgttgataagggtaatgttttttttttctaatacagctaaagactgagggtgcttaggtaatttaacttgaaattctgaagcttctaatttttcccaccattgttctcgtttagctcggctaaaaccctagaaaacctctggagctatggagatgatgcaggattcgttccaagtccataggattccacaatcgaagtatgtcgatggagttagatggcttccacaagcttctgctttgaatcgtttcttcgcaacagcgtcctatgacgcggattgtgattcttcatcaatcgagatccaatcgctcgacccaaaccctagagggaatcacaacacgaacccgttaatcgagtcgttatcttcatggacttcaccttctcgcgtttcgtctctagaagtcgcgggaaacggcggtggtggcggttcattcaaaccaatggtttcagcagctacgtcttctggttctcttcacgttctgatgattgatttggtggaaggagctgcgattgaagagttttacgcggcggaaggggagaggtttcatgtgggacgcgtggaaggtgtggattggagagagggaggagaatgtgttactgttggtgaagatgggagagtgaatgtagtgaagattgtgaatggtgaaggtttaaggtatagaaaggtctttgatgggaatggattggtggcttatagagctgtgaaatgggcttctccgactgagtttgttactggaggatatggttttggtttgcaattgtgggatcagaggaagtctggtgaagctgtttcacaactcaaagggaactggtgagttcttaactctgtttaatgattgaataaatgctagttcaatctggttttgaattcctggcatgtttgctcttcgatgatatggaacttgaaagtttgtgcgtttggctttagaacacactcgtaatatttgatttggtgagctgtttagcaagtagaactaagaatgggaacggtagatcctttgagttaatagtctatataagaagcatgcctatcctactgtgtctattctgattataacattgcaggtttcaaggcaaaacttctgcaattgtccactccattgacattcatccatctcggaagcacacttgcattgtaagtgttttttcttcttcgcatgtgttagatgtcttttaaagttcttatctgtttgaagtttgaaaaacgtctttcccatcaactgatgaacatgataattcctagtgtgatcctcaatctttaccaagtttttgggtatatagcctttggtaatattccttcatatttcttaggagatgaaagtgaatcattttgtttctgtgtttagaatattaaaccaccttgtcactattttcctttacattttacttgtcgctcacatatacgcacacaaaacttcagtgtagctttaagtatccccacaacttacaagcatgatttaataactttatatcttgatactgttgtgtgtttaggcaggaggttcttcaggtactgtatttgcttgggatcttcggtggccacagcaacccattgttctttctggggttggagcaagtgagaatataaacaatcctctgtctgaaagtgaggtatgggaagttcagtatgactcatacacaaaatccaacgtctcatcctcaaggattctccctgttatgacctgctctgaagatggaatccttggtatcatagaacaaggtatttacgcctttctaccacatttgttcttctttcatgtatgagttaccaaattgatgtttcctctatttatttttgtcctggctattttgctcaggggaagaaccaatcgagcttctggctgaaccttgtgccattaacagttttgacatcgacaggcaaaatccacaggtgaaaacatcacctaagtctgtttcaacaaactagttacttacattatgtgttttctcaagctggtacatacaaatgtgcaggatgtgatatgtagcttggagtgggaatcaatagcagttttctcaaggccttagtataatatggaactgtgcacggtatgctatgttttcttctgcgagctacaacgaagaaattgaggaaggtagtgatagatgatgagagacaagtttaaggaagagggtgtggaatgtgtttataagtttcattataacaagatcttaaaatacagtctgcacaaacagagttttgtattcatcttaaagttagtgtgatcttgaagatttgcaatcctggcttgaattgtacttctgaatctctgtcgctgtataagtagtgtgtgtataccgacaccaagttaaacctcaaacccaactatgacacgtggcgaaaaagaagtcggccacggtaggtcccaccggagctaatacttggccctctaatgagccgttgaaaagcttgaatctctctttttgttttctttttcaattctttaagaggttagaatttggtaacaagaacttgtcaaaccacaaaacaaaaaagaagacatgtcccacgcaaaaaacttaagctcttattaagttctttaatcgttcaaagattattatttcaccaatacgttccagctcttttcttaagatagtccagaatatcatcattattttacttgattttttactctttttgataacagaccctttcttttttcgtttttgttctcctgtaggagtttttgttaatgagaatttctgatacgaactctcaaattgattccatattatgctgagaaaaggtgaacaactttgtcctgtttatgatctgatatattttgtagttttgtccactttgattttggcataatcataatggttttggtctggcgtgccttttgtgattgattatattccctttttggatagtttcctctttgattgtctaaatattgttttgttaattcaccagaaatgttcatcatgtcttctacgtgaagcatttcctctgttcaagagattagattagtcatctactctcatcccaaaatctgcaagttcatcaatcattcttctgcaactttcctggtacaatgagattctttcttcttttattaagattctgctcatcttttggtgaagaaaactttactgtttacgatttttttcttgttttatatgaagtaacagttactgacattatgtatctataaatctgttcaagagaaacatggttgaacgaagccggagctttagaatacctggagctgagacaaatgatctaagaatcgctctttatgagcgcaaagaagtaattgagaggcttcaagaagagttaaatgcagagagagaagcatctgaaacgtcagcgaacgaggccatgtctatgattcttaggctgcaaggagagaaagctgagctagcaatggaagctgatcagtacaagagaatggtcgaagagcaaatgtctcatgctgaaatgtcctttgcgcttttggaggatgtgatttaccagaaagagattgaagtcactgctcttgcttatcaagtggaagtttatagaagccagcttttgagcttggggtttaatgatttgaaaagcttagatgttaagcttcaagaggatgatgatcaagatgagaatatgttgaagatgaatgatttttcattgagtgatagatctcaaacaccttctccagaattggttacagatctttcgattcccgaggaaaaggaagttatcgagcagagcttggagtcacagaagagttccctagatgtgtattgggagcagatcaagaaactaaatgagcaagtgaaagagctaacaggctttagagattcgatgcgagatcagcacaggacttcagtgtctgaatctaggggtgaagaagattttgcaagctcatcaaactttcaagaagttacacaagaaagaaaaaaggaagcaaagggtttgagtaagacgactgatgacacaatgatgataaaggtgtcaaagcagacaaagatggagaagaaaccatctaaacagacaagagatagaagcggtaagagaaaccgtgcagagtatcaagctgaattgcagcggttgagacagagagttgagaggcttgagcgaggaaagagtaacacagagcctgaaactagtggagtgattaagcaagaagagattagtctactgaaggaagtgaaggaagagctaagttctgtgcaatcatctgacgtaaagaagagcttgaatacaatggagaatttacaaccttgggtcgacccaaccattatttctgttcaagaggtatatgcattcagatttttgacttgtaaaatttagttagtatttgattactactaacaaatatttttgcatgtttactgaaacaggcaatgctttacttctggctatgagacaaagaaaaaagaatggtacaagcaaatttttggtgtttgttttgagtgtatattatcattgtgttctgtttctgtttggctaaagtagaaacttgtaaatctttgtataaaactcacaattgtacgtagattgtcttatgagtggcaattagcaaaaatatcgtcttgtggattccttgtttgtgtgtgtattatatctattgaagagaaatacaaaagactcactgttgatcagattgtttttcttggttaacaatttataaagacgagaactagaggttgatttgtgtgattaggtttctgaagggagatttggatttataaagtgaaagtaaaacgcgtagaggaaggtgaagagattagcgaagaagtttcgttattcaccttatatggctacacgacgagtactaatgtttcttcttcttcaaaggtttgtttcggtttcaaaacgttttgaacttttgagactttgagttatgctattaaggaacgttcacgtacgtatacgcatcagagaaaggttggaacttggaagacgagtgaaagagcaatgaagatgatgaatgtttataataacagtaagcttttctttgaagaacaaaaaaagagcaatgaactttactttcctaaagatagaagggagattaactgtgatgggtaagaaattaggtgttattaccagaacacgacagaactttttttaattactgttatattttcgacttttttttattacccagcgtgcccctactaaacgttaccggaaaaaacgtaattacagggaatgccactgccacgtcagaatttgctgacgtggattaaatgaactcagccggctgagttacggtatgttgcggctgacttacgtcaaaaatatatgagtcataacaaaacggcgaagtatgagtataactcagccaaacgttacggctgagttgtaaaatgttgcctgagttacagtataactcaggcaacggtatggttgagttaaggaatgttggccgagttataagaagttatacgataacccagacaacgttatggctgagttatgagaaaacggctgacttatttcctcgacacggccgagttatagttttggacggcttagttatggaatgatgtgacagctgagttatgatcaagtgttataaatcagccgtaaagagctcgattactaaataactcagccttgttacggctgacttatgtgcaaaagattaattactataatagcatgcagttacggccgagttttaaaacgttacggctaagttagttgagtaacgacattacacggctgacttaactttgttttttttccttttttaattactgtaatagtattcatgttgcgactgacttataggtttgcttgatggctgagttataaaatgttcgtttggtggcttagttgccacctcatcaattcaaaacgacgtcggctgtaatattccatgtcatcattccatgtcagcatcatcaaaagacaaaaaaaaagagtcaaattttttcgattcgtcttcttcactgagtttttcacatcaccggaacttataatttctcatcgttttcctcatttttcttcaatttctttcatctttctcccgatatggttgatctagttttggtaattgttgtttccgggaattgggtatagaaacacaaatacatatttaacactgatgaaagagaatgtaaacttgtgcagatagatgcgaaaacaacgcacgacaaacttgtgaagttggtgctcgatgataaagttagacgagatgttgtatctcttattgtttcgcgacaaatttacatgtcacggctgagttatatgcttaagggaagacgaaaggttcagtcaatttacatgtcacgactgagttatacgttccaagaaagacgaaaagttcgataaaattacattacggttgagttatatgcttaaaggagaacgaaacgttcagtcaatttacatgtcacggctgagttatatgttacagggaagacgaaaggttcggtaatattacattacggctgagttatatgtttaagggaagacatctataaatttacatgtcacggctgagttatatgttcaagggcaaacgaaagatgagtgtaaattatatgttacggctgagttatatgcttcagggaagacgaaaggttcggtaaattacatgtcacggctgagttatcattcagggaagacgaaagattgtgtaaattatatgttacggctgagttacatcacattacggctgatttacatcactttacggctgatttataatacagatcgaaaagcaacatttttctggggaagacaatatgaaatttattggccaaataacaacaatcaaattaagaaacgtaagaatatgtttgagggatacataggaggaagacgaaaccatatgaatcaaaacattgatagaagtagaaatatctctaaatagatcgattgagaggaaaactaaacgagagacatataaaatcaaagtaaaagagtagttattcttgattcaactcaaacctgtaacaaatcatataaaattccatagatctctttgatttgggttttgatttttgatgacttgaaattcgacaccatcgaaagagtttcggccgaaagagacgagataagtaaagaacggcgacaaaattagggtttcgtcgaatgaacgagagaagagagcgacaatttttttttttttttttttttttttgcgcggatgaacagtgagatatgctgaaaaaatgagaaactgaaagttttaagagaatttttggtttcggatgacgtggattagggtaaatgacatggattggtgacatggataatcactgtttttttatttattttttaattaaaaacgaatttaataataatatttaattaaaactaatcaagggtgttaactgtaattatacaagtactgaaaatatgtgaataataaaaaaaagatgtgttctattctagaaataaacatacaattgtgttctattctagtaattatttcaagatagaaagacactagaaatttatagcattgagaattatacatttaacatttttatcactgatccaaattcaaaatatacacgcatgcctcatttggattcttatcaaaagaggcatccattatagaccaaaataaaccaccgaaaataaaatcagctattctatatacccatctgtttcatccacaaagaccatttaatagcctcaagaaattcatcattcctgcgcaaagctgtgaccaaattggtgtaagttactttatcaggtattatgttccttcccctcatctccttcaccaacccaacagcttcttcaaccattccacctataccatacgcctttatcagcgtgttatagctacacaagtcaggaccaagtcccgattctttcaattctttcagaacatcagcgacttcatcgatccatccttgctctccatatatattgatcatgatgttgtatgtataatgatccggtccactagtcgacttcttcattcttttcaagatgcttctgaatttctccatctgtttatctttcccatatgcatccaacaaagtattataagcttcaagtgacacagaaaacccgtcaaattgcatattcttaatcgctgatgacatgtttgtatagtccttgttctttccataggcagctataatggtgttgtaggatataacatccacaactccgtgtcttttcgccaacaagaaaagctcgttaacctttttgaagagcttggctttaccatatacatcaaggaggacattgaatgtgacagtattaggagtgaatccatatcgaatcatttcctcaaaggttcctgagagttcatcaagcggaagagcacgtgcgcagcagtttataacacaattgtacatctcctgattccaatggatcccactctttcgaatcctgtagtacagatgctggagtttatcctgaaggtcacacttctgatatatccgaagcatatcgcggaacaagtacacatccggaacaatgtctttctgctcatccatgatttctaggacagaacaggcttcttccaaggatccggctttcacatacatccgcaccacaatactgaatccaatcctgtccaacacaactccagaagatttcaaatttaaataaagcttctccgcttcactaaactcacccatcacagtataaatgtcaatcattgtagacgtaatgtgcagatttatctcttcatcagattccattttatggttgtatattttcacagcatcagtaagttgaccagattctttgcaagagcaaatcaacagatgatacaagtgggactcaaatgctgagtctctccactttttttctcgcaacaaccccaagcaatcatcaaccataccatgtttgacatatgccatcactagactcgagaaagaagtctggtttaaacggatatgattatgaaaagaacctttgagaacgcaaggcaccacatcaatcttccccaccttctcataagcctgcagaatgatgccaagaatcgaggaatattggcacccgataccagtcatatcttcgattgtcttaatagcaccatctctgtctccatatttagcctgtaaattgattaaagtaaaaagattgaatgaattgggtttataaccacaccgcttcagctcttgatagtaatgttttgcctcctcgtaattgtcagcgcggccccaaccttcaatcattgacctgtaacttgtctcatctggttccagcccaatattacagaggcggtggaacaaaccctgtgcagcctccatcttaaaaatcttaccataaccagttatcagagtattgtatgcaatgatattcggagaaaaccccgcagcttccatagaaaccaatatagattcagctagctccatttttccttgttgactataagcattaagcatcactaaccaattctctaacttcagcctcactctatcttgtttcatcaagtctataacttcctctgctttatcatataatctcaaacgcgtgtaaatcgttatcatcgaggagtaagcagattcacacacaatcccgaattttctcatatgagaaaatgcaaattccgcttcttcaacattccagttcttctggtaaagacccatgagcatacctattgtagccacatttggtctaacaccaaactccaacatcatgtgaaaccactttgaagctaatttcacatttccctttttagtacatgcatatataaccgtgttgaagacctgataactcttctgaaactcatgaaatccacacagctccttgatcagatcctcggctcggtcccattcttctctccttcctaaaactctgagaatcaaactataagcaacaaagttacctaccaatttaccattacatctcatccaatcaaagaatttgatggcattcgtgtcactgcaactctcaagccgtttcaatattccattgcaatgctccaaactctgaccgggcttaatagcggaatagttaacatctatttccccattgttcacaaacaaattctcaagctcaagatcattgcttcctcttcggaaactgaacttccgagctacatatttctttgtccctctctgatcaccactcaatttagaactccggcttctctccacaggagctgcacttgcagaattaatagcattctcgtttgcttcagtaccgagactagagactcgaattttgtcaagcaccctagtcgaagaaccgattgaggaagctctagtggcgtgaatactactggtaacaaagtgaattggaaattggtcaggaaactgagaagggtttgcagaaaaatgaaacctttttctttttgagtcaaatgggtccaatggaatggaaaaccttaacgaacccatcaaagcgagctaccaaaacatttgcttaaaccggataacaaaaggttccagcttctctggtgttgacgattaagcggaacgagaggatataggaagagcctaatcgctgcagcaagagatagagcttattttcttactgggattgctttgctatattcagtaaaccggagatcatatcggctttgctggttcaattcggtcggaccaacttttattttgtttattaattttatttttttgaccaacttttattttgagactaaaaaaaagggagtgaaattttaaaagtaatactatttggagaaaaataatcgcaaaattgccatgaacatcatctaagactcagagaaatatgatcgtgttcgagatgaagagaagcagcagtggcggaacacgtattagttccaatagaatgtgtttgtcggctaatctactagaatgtactcaatgtgagtttacaatgtgttataaatgtgcaaccatcccatatcagttatgctggaaatatgatgagcatcctctctctctttgctatgaagatagcactagcacagatgaaatctactggtgcgaaatatgtgaagaaaaaatagatacgacaacatggttctacacttgcaacatatgttgcaccactatccaccatctatgcgtgttttgactcctctgcttacataaagtgtggttccacattcagttgcgatgacctaaaaggggaagttgttcgtaacagtagccagagtcgattaatttgcaaattatgtggcctgtgttgccgaggttacatatacctcaagtttcctaagttgaatttttgttctatgtcttgtttagacggtgccgaatcatttcttgatatactgatgggtatggaaacagaggaaaatgttatggcaactgggaacggtgtaactgctaaagatgaaactatgtctttgatatggacatcaaaatccctttaaattcaataactatgtccatcctccttattttttgcttctgttctaccatctgtttccgtctctctacaattgaacaagtacatgtattttttgcgatttttctttcgtaaattttgttttccttgatgcccgtaatagagtcttgtcaactatacaaaacaaaccagccacaagagtaaaagacagtaaactgagacaacaatggaagctatcaagacctcctagtcactatcataagggacaaaactaatatcgcttgagaaatcaaacccaaatgcttgcaaatgcttcttccaaagccctcctcttgcttatctctaaagaaaatcctccagctctctctgctttcatcctcctcgtcgcttcgtcttccatagcgtaatgttgacgctctgctccacctactataggtacaggttgtgggcccattcccgttggtcgtgaagcctgaccatatgtagttccagccgtgaccccatggttcgacgactacaaaatgcgtaaacaagtaaagagatttcagcttcgtcaggaaacttcatctgcttgttgatatgaaaattaaaacccaatttaccgtgtcagcatctgtctgtgggggtttggccttgcaagctgccaaggctgcagtcaattcttctgcctgttggagcaaattgtaaatacaccaaaagcaatttgcacagtgatatcatataaccaaacatgcttttaatcttctttcttttcctctactcattcatctaaccaagataagaaaaagtaaggctaacgtaggccctaccttacgagctctattaatcattatctgttcagcattctccttagaatatctcttaatcttctgctcaatcgcctcgacattgattccatctatcaagtcgaatactggtggaatagaaggtaatatatacattggtcttgtcttgcatgaatagagaaaataaggagcacaagtgaaactaacccatgcactccacttcttccaagtagtcattgtagtctttaagtgatggaaactcctcttcccgtctattgtatctgcatcaccagaaagaaagaaaaaaaaacatgatactcaagaggctgaaaatactctgcttctacagaatgaaaaaattgataccttaatataaatctatatctcatctgttagaaactgtgactaaagatctccattttatgctaaggtatgctaggaaacaatggagcatctcactgggtccatagatgggagaattgcttcattaagtgtatgcagtgaacaaagtattttctataaaaatgatcagatgtgaaatttagcgctatacatgctaagagtctatactgatcaatacgcagtagattgatcaaggggtttaaatatcacaccatttgcacaggcaagcatgatatgcaacgagagaaaaagatcagaacgaagaatacatctcagagattctccttctgacatgtatttccttattttgatgggtagaattagacaccatcaccatggttgcttctgcctgggattcttgtcctttcctctacctacaaggttttagacgtgatttcgcaaataaagctgcagcaaatattacacaagtcttatttttactttcggctatagaatctttagagctgaaaaccattatcccaatagggaaaaacacatgaacgagaagaaacctacgaagaaaacaattccagatagcgaagaagataaatctgcggattttccaaggatttctgaggaactaaggaagcaagcataaagcacaatgtttatgtagactcatgtgtaggatatgaattcgacactgaagtacaatgttaagcaagcgagaacagaaagtcgcctaaaacacgatctgaggaaaatagctaatagctatatgccaattcttctattcaatagaatgctaaagaccggagagaagaaaagtgagactcacaggtagaaataagaaggtgaagagggacgcgcgagagaagacactgagcccaaacctgaaacacccaaccgtccgaatcctcattcaaaacgtcgtagatctcatcttaacccaaacaaataaaggttaaaaatgaaacctttacctcagaaattgcagattccgaccaattgaagttcaatgttcaactcaagacaattcacttccagaaaaaaaaaaaaaaaaacaggtttcttcaatttgaacagacaaaggaagaagaaacccctaattctttaaaatatgggcttaggtctcatgggccaagtcaagcccaatgcttctgtataatttcgtttagacccccaatactagtctaaattctattttctaccccagtattatatccgttaccagattaatacccagtcctatacatcacagatcagacttcactttctcattacacaagaatatgttgttgttattcaaggatcgtatggctgacaaatggtagaaacttcttttattagattccaagcagcaaatgtttatccaaacaaacaaacaaccagaagaagaagaagcattgaacgtatcacttaaaacactgatttattctctttccctcttcttatttcaacggcctatgtggaaagtttttgattgagaatccaaatcacacattacatcaaatcagaactcattatgagtcactaacgagttcagacatgtcgcggctgatgctgttctcatgtgtggacaatggagttccagatataaaagccttgaagagcgcaagagcttgcttcggtctgtgcaaaggaacttcatggcctgcacctctcactgtcacaaagttcagaccagcatactgctgactccaccctcccacctgtttcaaatcatgactgtttataagtttttcttataacataagaaaaggattctcattttctcatcttgagttttgttttgtacctgtccatctaagtaccaaggaccataggcactcaaaggacgaaggtttagtgcatcgatactgtaccgggttgatgtgactggtacaacggcatctgcgtccccactgttaccaaagaacaaaaccttttctttttaccaccaaaacgccaaaacacttgaagaaaagatatcgttaaagtgctttcagtggatatatttagagaaagagacctgaaaacccagatacgaagcccagcagctataagctcgtggtaaatgtttagaaccgaggaaggagagtcattccagtgttcactcacgacatcactgcataaccaaagctgtcgggatcagaattgttacaatacttaaataggctcatttcctccaaaaccaagtttctaagatattgcaaggcaattttacctgcaagtatcccattttgatggtgcaagtcctggtgggacatggagggctttttgaacctctggaagattgaaataaactgtagtgtgtttctccgtacaaggatcatactgttcgctcacgcggctagtcatctaagtaaaataaacagagaaattaggacactaaagagtgtaacattgaaaagagaagttttaaggccacttacaggtcttttctttagcaacatatttgactgggaagcattggcaacacaagctggggtgaagacactgtattggtctatgttacctatttctttgtccgctatctccagaatcttgttacactgtttggaggagtgaataaacgattcgaaaccgcattgaagttgcagtaagctgtatgtttggtcagatataaaacccaacgaccaaatatattggaaaagaccaagcctgtcatggaaatcgtccatcagcccatttcctacctgcatccacacattcatcaacattgttttagagttttataaccttttagaaaatgaatcatagggggatcaataagaggacaggctcaccatgtaacccttcagatttatactgtttttgtcagaaccttggttatgttttacaatggcttcactcagctgaggaatgtaatgtcctaaaacaaaccagaagaaacacatgagtatttatggtcaaaatgaatggattaaaaaatgagatgagctttgaatttacctgcatagctctcccctactatataaaagtcccttcctttgtattccggaaaccgctcaacccatttcagcagaaatttcagtgaatcttcggctgtgaatttcataacactgaaactataaatccacccagcaaacatgaggatctaaaagacatgagcttaagcagctaaatcattaccagttcttttatcaccattgctcttcaaatcagacgaggtgtttgagtatgaataaccaactccaacaggtgcatcaaggaacaaaatatttgcagctgcaaacaaaaaagttgttcgaaagttttaagctttttttgaatcatagctctcttgccaacatacacagcacatattacttcattaccttggttccaagaatattgattaaggtaaagagtcttcccatctgccttaatgtgaaatggtcctatctcttctgcttcaccatatgcaacagatgaacatcctggtcctatagagagacaaagtaagaaccttcatcttagacgcagactaatcgataccacattactatgaaaagaactgaataaatcctaaaaaagattccattttaggaatcaaacaacatattggcagcataaaaatctacatgaacccaaaaacggaaatcacgtttatcatgctaaaagcaacaacaaaatcagaaacaagcaataagtaatcaaatccaaactaaagtaatcgaccagacaatcctcaaaagtaaaattgaagatccataacattaacagtagttcatagtgatcgaaacagagtatatgagttgaatccgaaaatgagagggattttgaatgaaattataaaatggagaaatcttagggattgaaattttgtctaacaaacctccattgagccagagaacaagaggcttagacttagcatcttcaacggcttcaaataaccagtaaaagagagctcttcccaattgctcattagtagcaacaaacccagagtagtgagcaaaactaacattaaaattctgaccaggcaatttcgagaccttgtcctgttctttctgagacaagccagcttcacacaaatgggctgtcgccaaaaaagctatagcgattagagcgttgacgagacaacaagaccctctggttttggccattgttgttacagaaactatacttcaaagtacaatgaagatcctttaagactttaaagactgaatattagaattagaatgtgcgaaatgacgtcagaagctactcaacgaacccaaaagattcggacttttttatttcacccatcgtgcgtggtcctcaactaacaacaacctcttctcgttaatttggcgttcgatgcggttggtcgaaccgtgaaacaacttaaggaggtgtttggttcgatttctgtttgatgcattgtataaaatcacgaataccttatctaaaactcgtcattggttggagtgttagtttgtttgtttgtcaatcattgactttggtaacgcaaacgcagataaacgtggccctgcgtttggagatggttgcgtgttagtggttgaaattgtatgcaaatgtgaaacagaagcaagtgcgccaggtttcacgtgttttcgagaattgagctgttaccaagcaacatcacatttctcaacgtttaattaactttacgtttggaaaagtgatgtaataaaaaactataccatgtgaaatacggggtcatatttttgtatattatacatgaagaatcttttgtgtcgttttcattcgactaattttcgccatgacttaggcacctctttttctaattttgaagatgacttaataagcttaaggggtgcaatcggagcttttatataaatgtatggcatagaatgaggctgcacgttcatagcattccctggagttatgcaacttctgtattgttttctcttaaatatcattttcagaaattaatgtaatggaagcaagaaatatcgattagacaaagataaatatcaagatagcaaaagcataattccacttttcatcgaaatcatgactagtagatagcaactcatgactagatatattggagtaaaactataaccatagacatatcttgatacttgaatcactaaatgaaacagaaaatctggtttcctttgatcatagatcttaagaaacgaatccaataactctgctagaaaaattctaaactcttagaatactagttcgcaccttttcaacaaatctgaatctcttttacattccagtgaatgcttttttcccgatagaagagcttccagccggaatgaccttcaggacattgaacctcaccgtctttgacaatggcctgaatcgttaacttgataagtttagaaacttgcgtgataaataaagatggtatcaaagttcaggcagtattatacaatagcatgaattcctttgaacgaaaaaccaagtatatagatattagtgctcctaacctgcattgcccaatggtaacacgatctccttctttgacacggaagcacggggaaacatgagcaggaatgtttgagtgtcttttctcatatctggtaggattaagcatttagctggagggtttcaaataagctgagagaatttgaacacaataacaaaaccgatccttttaccttcgatacttcttcacaaaatgaagatagtccctacgaacaatgatcgtcctctgcatctttgcactgtgacaagttccagacaagatgcgacccctgattgaaaccgtaccagtaaagggacatttctggtcaatgtatgttcctgcaaataaaatcaagaaaaacatagctatgtcaaacaatttccccaaagctcctaaaattgggcaaataccaccaatctactacccaagtcttagatcaatgagaatactaacaaagcggcattactctaaaatcagattactcagaaaatgtctcaacaaccaaattagagacactaaaccaaaatcctctaagttctctaaagaatccaacttttttaacaaatgaagcttcttctagacatggtaaagcaaaattgagagctgagacataaaaacagtaccttcaatagcctctcttggagttttgaaaccaaggccaatgttcttccagaaacgattacctcctttaccaggcctctttcccttaccagatttcttcgagctgatagaacatttgaatcataagcataaagagaccatagccaaaatacaaagcagttgaatttttgaggtgtgacaattaccttaagaaaacttttggttgcttaagaaacgccttctccgtctgcaaacacaccaatccatcattaaaagccaaaatcaaagaacccagaaaacgagaatccaacaactagcaatccccaattataacataaagacaatgtaatgtagatccaaacctgctctgccatggttgaattgcagaaaccctaaaccttgaaatcttctgacgaaaaccaaaaaccctaatcacggctttgttagtatatatatgggctctacttgttttgggcttaattaaggacttcaaattctttatgactatccaatccggttgaaccgatacgagaaccaaaccaaaacagtgttagaaaaccgatctgaaaactgaacctaaaataaaataaacaattttgctttctaaccagactggatggctagttagaactggaccggtgaatagtattttatctatgaatgcgaatcgaatgcttgatttaaatgaaatggttatctaaaggatcatttgccatatataatgtctttatacacatttagaaaatctaggcacttgaacttaattgtagaatattacggtaagtgttaaagacaaatcattgataggcacgtaaaacagattcagaaagtggtacgttatgcaatgacaggacattttatatatagcaaagctagtaggtccaacatgatgggagcttttatacttttaccatatattcaaccacttattggccaacacaaggacagtactctcaaagttggataacgtgaaaaaatacttaaaattttctgattacattaataatcgaaatacatagaaaaagaaaggatttcgttatcaactaagattcaatcaaataaagtaatccaccgagtgatatgaagttcttgacactatttcggttgtcacaaacaaagtaatatactcaaacttaattaagcaagaattattcatccatttatcgcatgtaacagtgagtttttttaatagaatatatatatattgtctcttagtctcatacccaagtcgataacgaagatgtagtgttttacaaattcccactaaaatatttgcttgaatcaatttaatctatcaaactcttgtagtatccacattcaacgcgaattaaatatctagctaatatcattgatatagtttattttatattataaaatcacaagtactatatataatataaaaagtgtgaagagtttgtggaatccatgttatcctattttcatttgtgtgggctatgtttgattctggatccaaagctaagttgtcaaaaaacgaatctcacgagattccccttaggtcatgtcaacttaataatcatatattagtatgtttgtttcaggtggcagcacatcttgtttccgattgttctgagctatatgctaacaatccagaaatttgctgcatgcattttaggttatacttttatatgtaacaaaatctatttgtttatacgttttattaagtaaacattgttttagtgaggaccatttaattagaagtattattattgaagagatgaccattttttcctaagtctaagaattacatatttggcatatacagaagattacagatttgccgaattc

SEQ ID NO: 651 - DNA, 93038 bp, Arabidopsis thaliana
ttcatatacataggtggagtaatagtttttgtctctctcacggaattaggattcttattttcagttgcaaattaaaacaatcctagaagctttttacatggatttgatgaaatgacaattgatttcggttcggcgtacataggttttgaaattacaagtgatttatgtttggttcacatagttttgaaatgaaatttgattttggttcggtttaaattgaaataactaatacagttttgaaaaaaaaaaaaaaaaaaaaaaaaactttcggagtcacgcgaggctgttttggaaataaagcgagtatatataaaataggcatgattttgtgggtttaccaattacccctacagaaatcgacgacacgcgctcaacgcgaggttggtgcgagtgggcatggaatggagcgcgtggcgcgaggttggtgcgagtgggcgaagtccagagtgcgctgattggctgaaaaaatagaaatagtgttgatgtagctcctcctctcctcctctattattaattcttcgtcattcttcagttctgaaagttgggtggttttaagatgcaattgagttttattctgaggtttttagttattttgaaatcattgattaatgtcaccaaaaaaaaaatagaatggattttgagatactaaaaatttcattttcattttgttctacaaacattgaaaactagattcagctgagcccctgaagaaatcaaagtgagttgaatatttttctaaaaatgtgaaaactggtaaaagtttgtcctcattttgctagaaaaaggattcactttaaagttaaaagaataagataaagcttctttggaaatctcagcattgcactaccgttgcttgcaaatctagaatctggattttaagatacttccggtgctcttgttcatgtttgcaccaatgggattgttttggtgacacatggaggttttgaaatgggtcaaggatttgcatacaaaggttgctgcaacggcctttaacattccccttagttcggtttttgtgtcagaaacaagcacatacaaggtacatctaactcaaatacatgcactcagtggacttttggccaagacaagattattattgttctctcttatcatttttgtggtctcttcataggttccaaatgcctcacaaactgttattgctctcttgtctttttgatattgctacgaagcttgtaagagagttagacgttgtgtggattagtgtaatttgtatggacagactttttaaaaataaaaataaatggttcaattagttaggatgaaaggaagataaaagggataatggaagattgaaagcagagaaagataggtcaataaaaataaaagaatttgtgttgctctttttgtttgttatgggatcagccaatcaatatttcatcaacttgctaatatgtaaaagacagacaaatagagtaacagtgaagatgatggttgtgatgtgatgaaatgtatgccgtttaagaaaagtgagtatcaattagctgagctttgtaaagtaagaatgaacaagttccaaaatatttaggtccaaaagatcttcccatggagcttggttgtgaaaatgctaactgagtttatgctcccattgttgcaaaagctttccctgcgatttgttacaaacaaacaaacaaacaaaatgtcaccaaaatgtatgaatgtttgttcaccattacaattgttttaggtggttgctcgagttctttacctcttgggatcgagtaaccatgtggctatgccttttcttctattagaaggtgagccccacaaacagctcgtttagcttctaaataaacatttcattatcaacatggttttgataccaactgaacaaagcgaaactatgaagaataagctaataattaagagatctgatgctgattgaaaagagggaatatgtttggaaaaacttatggtttagttccaaaatttaatggaatcgatgtgatgataattctatttcaaagctgagagaagatcacatttgtcacattaacaactagacactagaaggctcgaccctaaacagactgaactagccattaaaagatgagaactggagaatctcatctggttgtagctcttgcactcatggatgtgtgataattcgtacttctgtgtttcctgtaagatgtataaacatcatcgtactgagttggttcgttgggatcagctgttgccccaagtcccaatctcccagatccactctttttatcggtgcttccatccgcatatgttcctgtctcggggtccacctgtagattgggaggtggaggaatgcaggcacctcctttccgctgtggactatcccgctcataattatcatagtcgtcctgtgattcagatcccatgggaccttcacttgggttgacctcacctatctctttgaagaacttagatactctctcgagtacttcagattgaggcgtatcagaaggtggtatgaccgttgggatatcaagagggctcaatggagagtaaggcacaccactaccaatctgcatctttctgaccatcccagggatcaaaccaggaggaaagagaggataaggaggcggcttctcaccagcaggtggttgggttggtggtggaacagaagcgttaagcggtatggaaccgggaaaggcaccaggaggcatcacatttgggataaattgttgggttgcgaccggattagtcagatgctctaaattcattgtgctagagacattactgtttggtggctgttgcagcattcctgtaagttcataaagataaaaagttgttggtatattgtcaagtctaaaccgaattcttcttatacataggtggagttatagtttctgtctttctcacggaagagcaggagtacctggacgttgtaaggcatgtgctgctataatgggagaatgagaaaaggtatttgcaggtggtccacttttcatctctttctcaagagaggagatggtgtcttgatcaaaaacctccttagaagcccaaaactgcaaaatcttctccaaacgtgactggttttcttccttgttttgtggaaagtggtaaatcctccccagcatggaacccaaaataggtctgaaagcaagagcttcattgtcaaactcgtgcaagtttgtccttcgttgtaaactgtatttaaggaagcaataaacatgagaaaatattagggcagaagaatctaatgttgcaacccaaaattttgaaagcacagactgagactcctaataatatagaatgaacgaaaaactagtctatgccgaagtcctctagaatgatgtaaagagcgatcagggatgaagtttagatacctgtcgaagagaatgtcattagctagataaactatgtgcatctgcctatcagaatcatccattgcaaagaccctgtctctaagtgcctctgctaaagctggtgcaaagggagatctctgcatgaaccaaatcttagcacttttaatagactctttcgtgccattaaggttgcccaagacaccatttagttccattgcaacatcagcagggagtggaccagaaagacctcggaacgcatgagttgactgatcaaaatcaggacgagcatggggcgcaaaaggatgaggctgcggaagatgctgttggagctggtggtggtcatggaatggtgggaaaggaggttggcggattggtggcacagccaatgcaccaggtacattgttcattgaaggactcatcatgggatttggcggatgatgtatcataggcattgaagatgacgggaatggaggatcaaagggtcctccagggggatgcatagagagaaagtgcttatagcggtaataaccatgaccttcacccccaaacagaaacgcataatcaggattatccttctgtctatctcgcatcatagcctcaaactcaggaccgttcttaaccgaatactcaacaagcttatcaatccgtttctgcagctctggatcagctggaggaggaggaggaggagcagaatcatacggtccagggaatggcggaggaaggtgatgtggaggtaagtgaggaaggaaagcctgaggttgctgttgaccaaacatctgtgggtgaggaggatgaggaagatgctgcggttgctgctgctgatgcataggatgctggtaagggaactgctgcatagaaggatgaggaggaatgaaaccagaagcattcattggtgatggatactgaggatgttgcggatgaaatccgaattgtggttgttgttgctgttgaaagttaggaccttgttgctgctgttgctgagcataaggtaacccagaagaagcagcataatcgtgctgtcttcgatccatgtatataaactctgtaacacttgtgttgtatagattcagctaagtgttcctgagaagattgtaaaaacaaaagctttcgaaattgggccatataattcaatacgagagaagtaattcccagaaggtaatcaatatctacgcaaagagaaacaccgaaactatacacagtgtaaattgaagagtttaacaaaaaagcgacatcgcttaagaatctgactacacgaccctaacagcaagaaaatcgagagagcgagacacaatacctagttcaatcacttactaacaaagaagaacgcaactttctgagaagaaaatagttgaatcggatggagcagaagctaaacgcacctgaagaagaaggactgaaggagagacctttactctgctgctaggatccggaagttttaattgggccacgaaaaaccgacccaaaagttttaattgggccacgaaaacccgacccgaaatctattttgactaataagagttgaccgggtaatttggcggatctacttgatcctgatttatacccgacccgagttagaaggcactaagcagataaaccccagagactgagtaaacccttaagaatttctttaccagacatctccgccattaacaagatctctcttcttctactcgatttatgataagctacggattcactcgtcggatgatttgaaagtttctgaatcaaacagagtattctcaatgcagagaaccatctcacttgcggctgctaagtcttcttcttcgacttcagttctgtctcttcatcctctcatggctaaggtttgtgtttcgactcttacgctggtgagatactgaaatgttagattctcaatttaaaaagtttggtattttatggctaaatcattatactctcgtcgttttcgtattgaaatggagtcgaatttgtttcagtgagcttcaatttttcgtttatgttatttagatgtgtttgaaaattcaacagtagaactcatggagattctgacgattacttgtttctttgttgttgcagttgcagtgcagggcgattcaaaatttcccagcttcctcttcctcttcagtagttcgggtcgatagagtgtatagaaatgtatcccagcttcagtttaaaagagaaaattcaagttgtcttaagttagcttgtgcacttccttcgcatctaagtcttctcggttctcttagttatgcaacacattggagcagctccacttcaagggcctttggatatagtttcagaccgtttgcgaggagatatttttctcaagtcgctagtactgagattaaggatagcattgttggtggtgttgaaaagtttggtgggaataaaataggtttcaagaaattcaataagaagtggaagaagcatagggttttggcttccacaaaagctgaagtggtggcttctactgaaccagttattggagatgttaacagtggcatcaaggcgaaactatcaactgcagcttcacctgctagcaatgctaagcaagcctctactgtcaaaacaaaacggcagccaaagagcaagaaattcgaagataaatcttctccaacggtatcggttttggagaccgtctctgtagacgagagtttgcaaagctttcccaagcctagacattcgggttccggaaatcggaagtcttcatctgctgaggtattaaactagtaaagttttttgaatcatcgtcttacccttgctcatatcttctaacagtacagttctcagaaggaggtggtaaaaaaaaccaatgtggaggggcccaaaagttctactccatcgaattccatgtcagaacaacagcattggacctcaacaaaagcaagcaatgcaccaaaacaggagcaggataacattgttggtggtgatgagaaggctggtgggaataaagtaggtttcaagaaatttaacaagaaccgaaagaagcataatgtgttggcttcctcagaagctgaagtggtgacttctactgaaccagttattggagatggtagcagtggcatcaaggcggaactatccacggcagcctcacctgctagcaatggtaatcaagccactactgtcaaatcaaaacggcgccccaagaacaagaaagtcgaagataaatcttcttcagtggtaccagttttggaggcggtctctctagatgagagtccgataagcgttcccaagccaaaacattctggttctggaaatcggaagtcttcatctgctaaggtatttgactttaatagttttaggaccgtaatagtcttacccttgcttattttacctaacagagtaacagtacaattctcagaaggaggtggcaaaaaatcaccctgtggaagagcccaaaagtcctgctccatcaaattccaagtcggaacaacagcatttgaagtcaactaaagcaagtaaggcaccaaaacaaaagctggttcctcaacacatgaaaaacagcatagaacatcgaggtcaaaatgcatctaaaccgctttatccgccaagtggaaaatctgttattgtcgttgagtcaatgacaaaagcaaagattattcagggttatcttggtgacatgtatgaggttttgccaagttatggtcatatcagggacctggccacaaggtctggttcagtgaggccagatgacgattttagcatggtttgggaggttccatcttccgcctggactcatattaagagcattaaggttgcattaaatgggtacggtttcttgcctaatcactactttaaaaatctattgttgctattatctatattccttaattctagaatactttccgggtgtcaaagtgctgtacagctattgagatatgtggcttgttcaaacttgtatgatatgaactacttctttcctatggtttttcttattgtgcttatctatctcattatgtttaccttattcctcagagctgaaaatctgattcttgcatcggacccagatcgtgaaggagaggcaattgcctggcacattatagagatgttgcagcagcagggtgccttacatgaaagtatgacagtagcaagggttgtattccatgagataactgaatcagcaataaaaagtgcacttcaatctccacgagaaatcgacggggacttggtgcatgcttatcttgcacggcgtgctcttgattatctcatcggattcaatatttcaccactactatggaggaaacttccgggttgcccgtcagctgggcgggtccagtctgctgctttggctcttgtatgtgatagagaaagtgaaattgatggatttaagcctcaggagtactggactgtaggaatcaaagtgaaagggaaagataattcagccaccttttctgctcacttgaccagtttaaattcaaaaagattaaatcagctttctatcagctctgaagcaaatgcacaggacattgagcaaaggatcaaatcagaaggttttctagtgaagggcactaaaacaagtactacacggaagaatccgccaactccgtacataacatcaacccttcagcaggatgctgctaacaaattacatttttcaacagcacataccatgaaggttgagagctaaaacctttttcattttcattcactttttccttgaattcatatttctaataataagtactttgcagctcgctcaaaaattatatgagggtgtccaactgtccgatggtaaatcagctggtcttataacatacatgcggacagatggtttacatgtgggtttatctctttaattgtgtattttctgctatgggcattcattttgttttgattttcaaaaatattactttctgactgattcatcttatctgttacaacttcactttgattttccttgattcatttgtttcgtttttcatttgtttctgttcccatcagatagctgatgaagctatcaaagatatacagtccttggtggcagaaaggtaaggcatataaatgcatctgtgaagttattctacgttggtccgtttgactcgagaaaactatagcagcaatatacttattatctgcaggtatgggaagaattttacatcagatagtcctcgtaaatattttaaaaaggttaagaacgctcaggaggcccatgaagctattagacctactgatatacgtagattaccgtgtaagtaaatattttgccatgcttccctggatttatactagtcgtcatcaataatttaccatttgatttacttttgtaactctcaaaatcttttctttgtgtttccagcaacgattgctagcctgcttgatgcggattctctaaaattatataccttgatatggtcacgagctgtggcatgtcaaatggagcctgcttccattgcgcaggtaatatatgtgctatttttcactttaaatcatgcatagtgtcaagtaggttcttattgaccagtgagagaaaaagaaaggaaagaagagagcatgtaactgatattgaatggttgaaggtttaacattaggaaatccaacatatttctccaattttttcctgactctttccttcctcagatacaacttgatattggcaatgcctctgaatccatcatcttcagatcatcatgctcaaaagttgaattccttgggtaccaggcagtttacgaggtacgacctatttcatattttcgctgattacctagcagttatattattaggcgggtttctaatgcactgatgactccctagatttagcctttggagcaattcttcgtaattatttgcttctctttgctgtgattgtcatctgcatgtttatattgactgcttttgccttttgtggatttaattttgttttatatcaagcatcagctaatgcgtgatccttcttctctttggacatgtgctaaagcagtttttgttgtttctcctggtgatattgtaggatcctgaagctaaggcaatcaaaaataacgataatgatcagagtagtgagcgtgaggaaacttttaaaactctcagttcgttgaaggtaccatttctatcacattttttttttcacctgtgctttgtaattgtaccgtggtttcatttctttctgtcgtcagttttttcgtccattagagatgttgggactttattaggtgtccctccttttttcaggatggagatttgctacagattggtgaagtggagctcaagcagcaccatactcagcacccaccacgctattctgagggctctctggtataacactcctatttcctctgtgtcaaaagtatgtataatcccgttccagaatatgctaattaacaatatagcactttttgagaattagcagtcatggtgaattagttttctatagacgaagagatagaaatatgactaggaagatgagaagaggacactgacacaatagtttttccaaattgatctattcttttgtcttcttgtttctgtatacaaatctaacttacctttttaagactcaattaatcagcagatgcgtaatgaactctgactgttcgcgttttagtctccagtagctcattttggttccagttctccacacaattgtttcattattattgaaagttaagcattgatcttaaacagttctcataaaagataaggagtttcgttttgtatgagtgctgaatctggtggttgtgcagacattgcatgatatctttttgtactgccgtcaggtttcacaatacataatatgttaaatatgttttaatgtgtttcaggttaaaaagctcgaggagctcgggataggtagaccctcgacatatgcatctatatttagggttttacaggtatgtgctcgtactaggaaactattggcgtttttctagtgcttctgtttcatgctgaagttaaaaggcgctaccatcccttgaaattaacaatacccctcctttcatgtgaggcatagactggcagcattttgaaacctcttctttttttaacagcacagaaagtacgtaacaataaagaatcgagtcctgtatccggaattccgtgctaggatggtattttcttttaataaattgagctcacgaattgatgatttagtaaaccaaccattgcaacatatctttctaacctctgtactatctttccaggtttcagcttttcttacccactactttactgagatcacagactatagtttcactgcggatatggagactgaggtgggtaattagttcgttcttcacttgactctctgttgactatagcagtttctacattcgcatagatattttccaatattgcaaaatgagatactcagttttttcccttacgattgattttccttcagcttgataacgtttctggtggtgtaactgaatggaaaggtctcctaagagactactggacacgattcagcgcatattgtaaacgtgttgaaaatgtccaacgctcacaggtactatcttacaagaatgaactctggaagtttagtttctttctacaatttcttccattagtttcttacattgtcatacgtttacaggtggaaaaaatgttggaaaagaaatatgaggacgttctgttttctttgcttccttatcccagtaggacatgcccgaggtcagcataccattcatgccaatcaatttcaagatagagcaactgatttaagttgacaaaatcccatgctttcatatatggctgcccatgctaaagatactttcacatcagtgatatacagaggactaaataagacaaagtttctttatagtttgaatgagtgtatgttgatccttattgggtttctttccatgtttcagttgtatggaaggcaccttaagtttcaaagcaagtaagtttggtgcggggtatttcatcggttgtgatcagcacccttcatgcaagtaagtcgtacgctgttgagtctcttagtttttacacctacgatacttactcatgtatcctctcttatcagaatttacctattaatttttattagttttttatatatctatattgacatggtcgctgacataattggagctatgtggttcatatacaggttcattgctaaaacgctttatggagaggatgaagatgaagatgatcctccaaagaataactgcgtagaagagcccaaattgctgggtcttcatcccaataccagtgagaaggtatcgctgttctgacccttttctgttcacaatttgctaaaactttaatttgctgaatccatttccttgttcaggttattctaaagtgtggaccctatgggcattatgtacagctcggtgaagataaaaaagggcacacaccaaaacgagcaaatgcggcccatgtatgttggagttttgtcaatcaaataaatatatgtctatgtttccttcttacataaacggaggcatactgatcacacgttcagcttaccttttcttactgagaaatctcctgcaaccttatttttcagataaaggatgtgaactccattacgcttgaaagtgctctcgaattattacgctatcctttgacactggtaagactgatatgaaggttaaagttattgcatttctggctgggctgtttcaacattttggagtgctgacgacttggtatactgatttcttaccagggaacccaccctgaagatggacagcctgtggtcttgaagcttagtaaatctggatttactattaaacatcgccgcaatatggctactgttccaaaggtatagttgtttgatgccttcttaatgatataggtatagaataagatgttggtgctatatttgatacggaaataaggtgtggatctgctaggatctattgttttctatcttatgaaatgagttaaaagtgttgtcgttttcattgtggataacttggtacttggcagaacacggaaccaggtgaggttactttagagagagcaatgaagctcttgtctggcaaaaatgtgagaaaaagtggcagacctcctaagagtatactgcctgaggaagagaaaggagatgaagaagttgtggtagcgatataatctaatccacaacgtgacgcatgctaataaacaattggtttgcgagcttatatggatggagaagagcattattagctttgatgaagagtattattattctttttttggtaatcagagtaataatcgtaatggaaaagattggactttttttgtaaaatcattacacattttttaatgatataaaaatatccattctttttatgattatggaagtgtggtatttatgtacagagggacagcatcatctttaaattggcttttatgttaaagaagttgcagggaaaaaaggtttcatcattgaatttcctcaatcctgagctagatggtaagttaaatttaatcatctgtacaatttgtacattttctacaagggaaagactctactgtattatatactgagcatacaaattcagttgcgtttttcatgagcatgtataccttttaagtttaagtgtaacttaaggtggaacatggattactggttccatttggatcctctgtctctttctacgtgcagatcaattgcttatcagtcctcacaacttgggggaggaagtttgactctccgtgggggttggtccggagctgttaatgactactgcagcctgtgttgattcttcagcaagtactcttaatctgttgagctctggcaatataactttggaaagatcaggtctgtcttttcgccttatctctgcgcacttgagagccaacttggcaaactctgtggtgtcttcaacaggccaatcagacacagctggatcgagcaaatctttcaaattacccttctcgagagctctttcgacataatgggttagacccataggtggttttcctgttattaactgcagaaacataataccaagcgaataaatgtcagatttcacacccagcatacccgtctgctgatactctgggtcgatgtagcaaaacgtgccagcagttgatgtcatgtggtattgcgtcacggtgtttgcaacggatggagggaccagcctagccaagccaacatcagcaagcttgctgacaaagttgcggtctagtaagatgtttgctggtttgagatcacggtgaaccagtggttctggtttagtctggtggaggaacaacagtacagtgccgatctctgcagcaattctgaatcttgtttgccaagagagagccgggctgtctccttgtctgaaaagacggtcttctaagctcccattagccatgaactcatacactaagcatccacattctgggcatgctccaagcagaagaaccatgttagggtgccttatactgcataacacttcaacctgtgtttggttgataaatagtagaaagcttaattaaagtctgttagccaagaaagagtccgaggtgtatttcatagacattgttacgagacttcacctctttctgaaactgtgacctgccttgagctgcatctgggcgcaaagctttgacagccacaggtgtgtgatccagataacacttgtagacaggtccataactgccttctccgatcttgtatttatcatcaaagaactctgttgcatcctcaatctcctcaatggagtacttcctgtatctgacatcctttgctaaagcattcacggcttttgttctcgcctctgattccttcagagctttcgtttctgcatcgactctctttcgggactcgatatcagcaatcctttgagctgcctcagctgcttccattgctgctttggactttgctttctccttctccgcaatggctaatgcagcttcctctgcaagctttgcttcttcgaatttccgttcttctgctaacttccaacgttgaagctctgttgcctgcaggttcaacaattcgcttagtaggaactagtgagaaacaaaaatgaagcaacactaatcatttttgcgagagtcataccttatgttttgctgtgagagcttccttacaggctgtactgtacatttccatcgtttgtttcagctccagtttaagcctcctcatctcagcctctacatcatcctgattacaattctaatctggttacatactcttgcatctagcagttacaagtatgtaacccgaaaaaagattcacagatcagtcttacccctccttgagaagccgatgaaaacctttcattctcaaatgagccagttgagaaagcagttggtgagctcaaatccattgacctccttccgaaggtcattgactcgaagctacaatagtcaacgtctgagaaatttgatagccttggaggagtccggtttggatccgaattgtcatataaggaaggagagttgcgctctatgcttggtcttccagagctgttgaaggatatttcagaatccgggattgatagttctccatatgatctcccagtcaagcctcttttattgtagggtggcctgtttcaatcaagaactttcatcgtctaaagtctatggtcatgattctccgagtgtgtcaaatgaagaaaaaagagtgatatgcacctgaaggaatctgactgatcgtcaagggacctgcgatgctgagactcaaatgactgtctctcagctacaagaaaccaagataaaaacaaattcagaaaagtgcaggagattgacatgaagaagcacttagaaaagcctttttttggtttttaacctcttgtgttagtagttgcagaaggcaaaggtggatgtggctttaagccattctgttgaagctggatgcgtaatggagaaacagacggcgcagcacgagaagctgttttctttgttgaaagctttcctttggttatggcatacaccgtgcagaaatcaggtgcagtcttggtgatggctcctggaatatcaataggtttgttgaacctgcagcagagtcatatataacaccttcaattttgacagctgatccaacttttctggctaaaagactcacagcaaaaccggaaagagaaagataaaaaaacacacctgagaaagccacctttcgaggaggaaccaaccaccaatacctcaatcatgacctgatttgcgtattcgactaaagctctcgccacatctgactcctccaataacacatctttgcattgtatctgaacatgttccatttcaggttataagcataggaagagacagagcacaggtaaatttgttttctggcttatattacacaagaatgatggagactcacatctttgcgtgaacagaggcaacgaaaaggaagaaacaactgtttataagagccttctggttctccacacaccaatgaagaatcaccatttatttggctcgtctctgaaagagacaaaacccattagctatcgagaaaaacataaaagaagcagaaggaactagaaacagagaagatatatgtagaagaaaggttttttactagaagagtttgagttgattgaagggtttgtggacaaagatgaagcccgaggcttgacatgtacgaggactacggtttggcctttctgcaacaaattatcaacagcccatttcagagcaccttggctgtttttgtctctgtctatcgccacagcaaccaatccatccacgccaaatcctccgtctctgtccctcctgttcttcgccatccaaatctaagagcaccacacaaagagatgttttgagcttcaatggacaaatatgtggtttgttttcttcaaagaagatccgtttcagattgttcttggtctgtaatattgtaggaagggaaagaaaaaaaaaaggaaatgaagagaagagagagaggtttctataataatccattgactctgcttctctctctctgtttcgagcgcctctccttcttccccgcctctctttacccacaaacggctttttggttttgcgcacaacaaatcagattatatccaaatgaaaacaaaaaaaatcataagctaagactttcctttcaatctatacttgcaagaaaatgtaaaaacagaatataattttattaatgaaataagcatgttaattgtacaaacagaagatataattacaatgttgatcctaattcctcaactttgagttttacatgacaacattacatatcacgattctttgtctactaatattacaaaatctttcagacaaatcacgacgaccgtctcttttgctaaaccaataatgcttcttcttcttccacacatgtaggatgaagatcataatcacaagcattgcaagaaaacgcccaaaacctgccttgcttcttacagaaatcacacacataagctttcgccatatccagttttagctcgtgttcatgcttgttatctttcactttccttggaagtgaatcaccttccttcttcaaacaagcttttaactcaacaatccttgattccgtgaacggaaaactccttgatccatacaatgataccatctctctcgcgtttgtggtcactgttttctcttcgggtcctatgatgaccaatgcaggtatgagtttgacgttgaagattctacaaagatcttgtcttgttctgtcctcataaggtattgcaagccatggcatgttggtcatgttgatgttaaactctcttgagtctctgtctgttgaaattaagatgacttcaaaggagcctttatctgtagtcgccagctcattgtacacatctacgagttgagaagtgaaagatcggaaaggcggacaccagtgtgcaccaaagtacaaccctatggtctttcccacaagtttagaaactagcacctgcataacgttcgtagacataatcttataggatcgttagatgagaccagatatatgaaatctataaatgagttctttttaccttgcttccatttctggcaacaacgtaatttcgggactcgtgagtaaggagtttctccaactgtcctccaaggcgtttggagtcatcgatggctttgagttcttcttttcgctttttagtgaaaggaaaggcttcagaaccatagtcttcaattagaccaattacatcttcagcgactgagatttcatctgaatatagaggaaccagtgacgggatacgagaaattccgtacttgtcccttaatttgttgagtaggcttaaattgaagggaactgcaagccatggcatgcaccagaaatgttcatagaatgaagtcatatcatgatcaaatgagacaaagatgatctcgagttcttctcctcggttctgaagattttcgtagagttttatcagctctggagtgaagtccttgcagggcctgcaccagattgcagagaagaagagacaaatcgtcttaccatgaatatattccaacggcacctgattgaagtgagcttacagagtataaaagaccagacaattataccaaaatatagtgcaatataataacgagagagcaaaagcagtacctctccactatgcgacaaaagaaactcaatcccttcagctgctagtatagagtagagatcaccactttcaggaaacttaacttggtaatcagctgatactgccatctaaactgcaacaccactatgctctttaagctgcttctgatcagaaacctaaaccaacatgagaaaacatgcttcatcaagaacatgtaccttagccttattgtacgagtacatgctattacatatccaaaacggctcaagctaattccagctcgaaagacttctaaagaaatgagcatatgtgttgtagttaagtactacttgtgaagactgagatgttctatacagttctacagtaaaacctgagttcttattctggatcaaaaaaaaactaaggtccatcccttcatgaacacatgaaatgatcaaacatacagaaatacatatcaagaccagttacaaaacatcagaaacccagaacaaaacttgaaggaacatacaactttaaaaaactgaaacagagaccaattataacagggtttacagacgatgaactgtctcagatggcctgttgagaaaagtaataaacaaaacttaacatacctgataccagagagatggtggtataacctttgatacgaggaaactataccgaaacaagtttcaatacagagtagattgtaacaaaatttccacacaggtttaatccttattgatgatatgcctctcggttgattaagcttgtaaattccaagaaaaggggataaatgaaatcacatggggacaaggaaatataaatagaaaaaaaaaagatataaacttaaactttattgaagtctctctcaaaagaacaagtaaaagtaaatcaaaatatcctcaaagaatataccatctacaaggttaggttacccaatatctaaagcaacaagcttgtgaaaaccattaattttatattcttgcttatctcaacactgcatcagaaagtggacaagttgaatacgaaatggacataaaagacattcttttgcgtctagatgataccaaagtatggcacgaaattaatattcacaaaatggggaaatagctgaaaagtgaaaaaatcaacaaaagaacaaaagcttgaagctttactcatcaatcatatctgttaaaactagggggaaaaaaactgaatgcgaataaataaccctggcaataaaaaataaaaagtaattctcattacctacaaacaaagacacgaacttgatcaacaaatatcaaggaaacgagaattagatgaagaataagactagtggaaagaccagagagagatacaggcctttcaatggaagctattacatgagtgagaactcctcagtcatagctcttgaagaacgatgatcaccatcactagcagtcacgtatgaagatcgaacactctcttgacctccaccagcatctctatcaacctcttctattcgatcaacagcctcatgaagctcaattctcttctcaatatcccaatcacaacatctcaacccgatcttaagcagcttcaacatttgtgcttcgtgctctttccctgctttcatctccttatcaaacacatcagcagtccactcggttctcgctacagactcaacccaagcagctaactcatcatcagctcctttcccttgcctgagataattcgccggaaacttccctgtcagaatctcaagaatcaagattcccaggctccacacatctgatcttctcgaagtcctatcctgctgagtgaactcaggtgccttgtaagccaccatgaactgctgtgattgatctctgttaacaaccgggacaagagcgtagtccgtaagtagaggctcgaagttaggatcaagcaacacattggaagacttgagatggccatgaggaagattcaaatcagggaacactctatagagataagccaatcctctcgtaactcctcttacaatcttcaatcgaatcggccaatccaaaaccacttgacctggtgttcggttagctgcaaaatcaatccaacaaaactcatcagattcctcatttcattggatgaagataaacagacacttagagagttccataatattaccatggaggagattagcgaggcttccattggaaatgtaattggtaacgagaagcttctcttcttttctgtaatagaatgcaatcaacggaaggagattagggtgagacaatcgtccgatcttcttcatatgatcgtaaaactcttctctcccgatattactcataaacctaaaccgtttcacaaccaccgcacgaccactcgataaagccgctttgtacgaagatccaaatccgccgcttccgagaacctccgccgatgcacggagcatatcctgaagcgtgaacctctcctgatcattcctaacgaaatgtagcttccgttgatctcctcgtttgtcttcatctggagagagacctcccacggatatagctcctgatgttgctgttgaatctcgctgcacagtttcattagctagttttctgtagaccttggagtcctgtgagctcttttcactgtgttgttgttgctcgggttgtccgtagacttgtccgtgaaaatggccgacgccgtggttttggatttggtcttgtcctttgccttgacggcggctgagaatgcaaacggaaagaaagacggtaatgagcactacgacggcgaggatggtgagggcaaggagaaacacggtgaagaacggcggacgagtgtatctgcacggaagcaatggcgctccacacagccccttgttacctgttttaaggcccaaacgaattatttaattaacatcatacatggcccatttatcaataggcccactaataatcatttcaaagagagtattttccacaaatattttgtcaaaagaagaaataaaatttcatattgtaacttttacatgcaaacatttttttttattacatgcaaaatttaatgcctaataacgtgctcactactactcaccaaaggctccaagaccaatatgttcaaattttcccatgaatagtgataattacataaagtctagtccttaggaaaattttcacaaatgttgtgtgttgccagtatatatatatatatatatatatatatatatatatatacatcagattataatatgaaagatgttcagatgataattaatcaaagaaaaataaacagatttgatgatgatgatgattcatacctgagaagaaagtgatgttcataaggccgagagttaacggaattcgaccctctaactgattgttagcaacgttaacggtgacgagattcttctgtttaaacgccggtattttcccggtgaacatattatcctcaagattcagctcagtaagcttcggcaatttccctaacgactccggaatctcaccggaaaaccggtttccttcaagatgaaccttcagaagagccttcatcccggagaacaaatcaccgtctatctcaccggtaaactggttatgcgcaaggtaaagatgcgccaacgaaacaagcccgtcgattccacgagggatctttccctcgaaatggttacgcataaagctgatactcttgagaccgcggatggacccgagcgcttgaacatcaagctcaccggagaggctcatgttctctagacggagagcgaaaacggagccgtttgaacacatcactcctttccatttcgagtcacttcctttatcaccggagcaaggaggctcaccagagtcccatccaccgagcgagctggcgttcacgagagatgacttgaacttcaatagagcatcagcatcaccgtcgccgtagataggagaaacgaagagcaagacgatcaataacagagagtatacgatcgggaatttgtcatcacgggtcatttcggtgaaaaataatcgaaatttttgggatttgagaggaagaagagagatttatacgtcggaagacgtatttgttggacggcttctctatgaattaatcaaatgagaggagacttgccggaagaagtatgaaaggacggctgatggtgaatgacagcaaaggtcaaagcacacaatcgttttcgccaacaacgtggaaccaagtactgtgtaagcttgtccatggtatgattactcatagattttttattatataccttgattacgtgtgtttatatatgtactagatttttgtaaccaaaatatgattaagaaattcaaatgtattgcattccacattatttatcgcgcaaatattactagttgctattttttatttagtctaaaatatatacgcaatccaaaacatagtgtagtttcatggattttcttatagatatccttattttgttaatttatgttgtaatgtttatatatctttccataaccaaatggcctctatcagatttagcgatcttttaaagtgcagaaatgctttattttgaagctttcttgttgtaaacttgtaaattgtaatcatcaccaatcaaatactttattttgttgtggagcaaagaacggtgtgttactcaatcctgcaatgtctgaaataatatccctttatcaacgacagctttttgttctacaaaacttttggctccatatttcatgtcaaattaggagcttggtaaacataaaacagttaattaaaaagtgtaaaactaaaaccacgctcgtcttgtataggtcgttataaatgtgtgtgttttggatggcgatccctttatttcgtaattgatattcagacagaaaatatatttggagtctggacggaagcgagaacaccaccgcaagatcggatatcttgaattggaatttcagacttaactttgtctgggtataagctacgaatgatagaaccggctgctttggaggcaatgaggaagctctccaaggagtttcttcctccaggtacttttgacttcaagcccatcattgcgtgatccggatgctttgagggctcatcttatggatgccatgaatcaagcgagagctgtgccaaagccataatttatcttcttcttttttgcagtttgcaacattctctgaacaaattctatgtaacctcttactatgttacttatgacattgttaaatcttatacactttggggacaccaaatccacaagctggtaagatactaaagaacattgggatatattgcatagcttgaaagtatagaatcagtacgaattattatacaaagtcgatttccaattgttaaacacaaaagactccatggcccaatggataaggcgctggtctacgaaaccagagattctgggttcgatccccagtggagtcggatttttatgcttttgccctgttttgtatgtatacttgacagattacagacagcttttgaaagtctacaagtctacaacattattacgattcatggctaagcatttacaactgatagtttattcacattgtaaatcactcgatttcttgtggaacttcatgaagcctattaagggtactaacaatttcactcagacaaccgatgagctcgtctccttgctgtctcacagacttcaacttgtcgtccatactaacaccatcctttgtttcattatcctttgctagatttctcccgactatcgcatgtatcaagtcaattttataacttagcttcgcttccatcacttctacatcctcttctatgttcattgtttcatcttcttcttcatctgtggacatatcttccaccggcttcttctctcccatggttttgttctgatgggttgcttttgtagttataggtttctctcgagtgtttacttgaactcggctagtccgtggctcttctttctttgtctccttcatgaccattgttcgctgtcttgatctttttgatcctacaaaagctgaatttaaaaccagagtgattcaaatggttagcataagaagagtgtcagtgtgtcagtgattctggactgatccgagtaactccaaatatagcagttcagagtttacctgaagatggtgactacaaaaagagcaatataatcatagtgtagctcacggtagcaaagtgttctacatatatttcaactataactacaccgacaattttcgtcattctgtatcttgaagaagtgaataagtctgtctatgcactatttgttcttaagattccttaaaggcctagtttcatttagtaatggggcaagaaaaggatagtgtatagtgtacctaattcagcagagagatcaacaacgtcttgcgcttcagggtcactatcagattcagtcccagctttttcatcttggatcatcacaaccgcattgatggcttcaaaaagctcgatatcgatatcccccgggagattaagtaacttcctcttgtcactactcagggaccaataggaacgaccagtgcctcggtactgagattcccacttcttgatctgattgtaatcagacatcaaagaatcccatttcctcctgcattggtttagatttctgctaacatccaaagcgttgcagttctctgtgatcattgtccatttctggaagctagataaagcattcgaacaatcggcttcaaccgcagcgatctcattcacgaggactagacaatctttgactgcccattctggagcaacttgagaccgtgttctccgtgaacctgaagttccttcctccatccaaaaaggcttaaactgcaatttggtttaccaacctcgttaatatcatcatcatcagtaaagacattacaacataactgtgatttgaaactctaataaaacctattgtcaatgaacaataaccaaagaggtgcatcttcatgtttctgagttttgtataaatctgagaatggtaagcgatattgaaattcaggaactaaagtacacagataaactccacaaaaaatgcagctagatttttcaacattgaagaataataactcggtaccaaacaaatcagatacaaaattcaaacaagaatccagacgaacacgactggagaattccaaactggagaaagaagaaagaagaaagaagacaactttgagcataaaaaattaccagatcgccggaaactgcttctggaaaacgacacgtcgacgccaggcaagtcactttgaagtttgctccaagacgatgaggaaccgagtgaagccgaagcaaattttattgatgttatctgtcaacaggcccaaacgtttttttattgaattcggcccaaacctattttttttgtttaaatggcccaaactataattagatattgattttgaagagaaaaataatttgttgttctttgtcaaattaatagtataaatttttagacaaaaatctttactatgagtcaagcgaacccactttaacatgtagtattttactgaacatttccaaattacaagacctcatcatccaatatagaatacactcactcgcctgatgagtgatccaatcctcaaaaagcatagtaacaattataataatgcatttattccaatttgatatttgaaataaacaaagatatttttgtggagattcatctagtttttgctttctagaaatattttttatggtataattcgagaagaagcgattagtcgtgggaaacatttgatagtttagtcttatttttatgtaccagtgacgtcggtgatggcaatgtatgtatatggctttgtgtaacaaatacattctgacgtttgtgtttttgtgactgtgtctttgtttgcctcaaaattcaaattttaacactttttaaataagccaataaaaaaaaaaaggaaaacacttttttgtctttagctaccaaggtagacaaattatttgaaacttggaatattttaggaatgtgtttggcttcaaaaatagtgagatgaacaaataaattctagattttggatatatgagtttccataagaaacaaaacaaatatttcaatttatgaattagattaaaaatttcttaacatgagataccttgtttagagaacaaagatatttcttttagaaacaagcgtcttcaccggccagtcacgtgacgaatggaaaacggaacagacaaaaaatctgcagaacacaaaaaaaaaaaaaaaacatgcgtggcatgaacaatacggttcggtctccatctctctctctataaatgctcttcttcccacacatcgcctcctcctcattaagatacatctcgagaagcagagcagagagaaagagattccgagagagagagagaaggagggagagaaggagcttagtggtctcattaccattaccagctccatacgaaccgaaacgacgccgttcgctcaacccttttctctgcaatctctcttcctcccacgagtttctcagcttttctcggatcatctaattaagagaggagatcttgtctcacggtgggattgatttttctcttcacgaagatcgtgttccagggtaaagttttgatttttattcatcttactcattttggttaaagtagcttctgttctcagcgattttctctgtctcgtgtttatgtttattgtagttcaggaaatgttcttactgttctgtttgattatatgattattgcaccaaatctggctagaaaaagtcaatacctttttcccttctttctagaatttgggaacactgtttactagatttttgtctttgttccaaaagtttgttcattcatgtcatttacgggttataactgcaccaccattgctatggaacgcataacctacctagaaaatcttccttgcttttcaaaataaagaaagggagaagatttgattcttttatgaactctgagctgtcctgaagagaacccaatatttgagcttatctgtttacatttaaagaggaagtgacaatagaaacgctggtccatcgtgatttgtcttacttgtttagctcttgtcttgtctttactacatggtgcctttttctggcatttaccatccacaaaatcatgatttgtgtctaaatcttagattttgtctttttttttgtgtgtgtgtatgtacagcaattaactgcagaaaatggtgatgtgggtctttggctatggctctcttgtgtggaacccaggatttcactacgatgagaaagtgttaggtttcatcaagggatataaacgtgtctttgatcttggtaacccttttctgttaagataacagttttggttctttgcgtatttgattgatttatctattcgtcccagctgttgattattgattgattgatttgtgttttgatttgacttggtagcttgcattgatcatagaggtacaccagaacaccctgcaagaacttgcaccctcgagaaagctgaagaagccatatgcgtaagtagctattcttaatatgtgtataggatcttagagtctgttcatgaggcctgcttgttactcacacattattcttttcttactaacattccaatactttcttgacagtggggtactgcattctgtgtccgtggaggaccagaaaaagaacgtctggctatggaggtatgtccttgcatctgaaaactagatcgcttgatgtatcatggtcatgcctttgtgttgatctttctatttgtacacagtacttggaacgtagagagtgtgaatatgatctcaagacaagtgtagacttttacaaggtgagtcaggactcagccgagattattgaataagcctattattccttatgctactaaaaattgacctcaaaagtttcttccttacacaggaagatgatcctctaaagccagctgtaactggagtgatagtgtaagttgtttcctatgacacggatccatcaacagctgttctcacatcgatttttattttcttctacaaatctttgtgttgtgattttgatggatgcatttctttacaatcttcagattcacttctactcctgacaaggtctccaacaagtattatctcggacctgcgccattagaagacatggcaaggtatacacttagcttccagcccaatttcttctgttcctttagtttatgtgccagattcttgtcctcacacttagctgttattttgtatattcaaagacaaatcgcgacagccaatggaccatgtggtaacaacagagattatctcttcctgctcgagaaggcaatgcacgacattggttagtccaagctccatttgaagtctttatatgaatagaacatctgcccaggctttgtagtcaaaggttctgaccttgatggttttaagagagacattgtttttgatgtgttaagccattttttatttcacacagggcatgaggaggactatgttatagagctggcaaacgaggtgaggaaggttctggccgagtcctcgactaagaaggtgacaccggtgaaggaatcaagagcaagccgtgtagctaacaagtcgaagaacaatgtccccacggctcatcagatactacctcatcatccagaagctgttgccactacaatataactcttgtagttttcttcttaattggctttagagatgagtgaaatcaggtcttttttttaataataataacaaagtaagtttgttttctgagtagagaagtgtaatctttgtgtgtttcgaactttgttgtcttgtgtgttgtcctaacgagtgcctacttgtgcaccttttgaagaagattaaagctaaaacaaagtttataaactaacgtaagatcgaacaacatacgtcacatttcaacaaaatgcaaaaccttagagaaaacttgataacattcctaattccttcaccgtgggagcaaataactgaaatgtgtatcgagcttgtatttggaagatccatggacaagtaggtattgggcttgtatttggaagggccatgaggacaaatatgtattgggcttttatttggaaggtccatgaggacaaatagatattgggctttcacgttttttatctgtcgcctaacaaaacaaaaaaaaaaagtaaaaccaaaaaaaagaaaggagagaggccgacttggggtataagccagagttcttcttctttttcaagcttcttcttctcatcagtcatcaccggaatctaatttatactcgcaaaactcagcgattcgtttcgtttctgacaagtttccaattctacagcaatggatctcaatctcgatgcacctcactccatgggaacgaccatcatcggcgtcacttacaatggaggtgtcgtcctcggagccgactcacgtaccagcaccggtgagatttccccccttctctacttttctagggttttagttcctcttcgttgggtttgtatttgagttttgttttcgtttcaatcggaacaaagaataatcctaatcgattgttctatttgggtaatttagagaaagctgttaaatttgggatctgttgtaaattactcgcgcaggtatgtacgtagcgaatcgagcttctgataagattacacaactgacagataatgtctacgtctgccgctctggatcggtaataatctctcttagggatttcatttttgtttttgtttgacctgttctgctgtggaaactgtttagcttgctagacttcttattgaatctcttttgcttactgggtttcttactcgaatgtttgttgttcttgatttacttgcaaatgggatattgattacaacaagctctcttcttgttccttttgcaggctgctgattctcaagttgtatctgactatgtccgctacttccttcaccagcatacgtgagtgtcttgattgacgaagctgcatgacttgatacttatgctatcttatatatccggatgatttaataattcgttttcttatgatttgcagaattcagcatggacaacccgcaactgttaaggtttctgccaaccttatcaggatgctcgcatataataacaaggtacaagtttgcttttaagcttgccgtttggtttggttgttttaccagcaatttagactaagagtagtgaggaatgtggatgttgttccattttcttgtagagaaaacatacccatactcgactcaatcacggataacttttgtttggaagtttgaccctgggaaatatgacagtttgcttatgtttttattgctttattatgactaaagctgaaaattttggggcatagagattgatgttacatgtcaaacctaggatgctagtatttatgaatctcttgttgttcgtagtgttactgttatggttgttctctagtctaaagtacgaacactattaatggaaatgtagaaagtctctgttgtaatgctactgtatgtagtgctcaagaagtatctcagttttctatactccaaatcatatccagtttgttattgtatggtgattccttgttttgattacatggattgttaactgaaacattgtatgtctttgttgagcagaacatgctccaaactggtctcatcgttggaggatgggataaatatgagggtgggaagatctacgggatcccactcggtggaactgtagtcgagcaaccgtttgccattggaggtaaaaactatattgttatgagtcttatgatatttaggttttaacaaagatgtattcgattaattggtctttgctatttactaacttgaatggtccctttgcttctgttaacaactaatggaattgtgtgtgtttgtgtaggctctggttcgagctatctctacgggttcttcgaccaggcttggaaagataacatgaccaaagaagaagcagaggtaacgcggttcacatcactgtatctgcatatgcaaaaatctcacaaaccccatttgtataactggtcgttgctattgtatttacgcttgtgtatttatattgcagcaacttgttgtgaaggcggtttcactagccatcgcccgtgatggagccagtggtggtgtcgtacggactgtcatagtaagatctttctctgaccagaagctcgctgaagcgaaacttatgtaacctccttaatggtacttaattggcaaactgtttttgatgtttttgaacagatcaactcagagggagtgacgagaaacttttaccctggagataagttgcagctttggcacgaagaattggagccccaaaactcactcttagacattctgaacgctgctggtcctgaaccaatggccatgtgatctgcaaacaacgatcattatcttactctgttgggcaaacattttagatatttcattacagtttccagtgtctttaagactttaaactctgtttgaggttctgttgtaatgaatgacccgatctttctgttttaaacggatatcgtgtttcttatggctatggttttaattcctctgttctcgaatcgatccagtagaaatgttagccatcttctccgaaattgattttcagttcttttttagtgaccaagagtttatggtgaaaaaacatcgttcaaaatagtaatcacaaccttttatatgcttgacacgtggcgggacaagggacacttgaacttctactcagtcgcaggaactggacggagtaggagagacaaagaaggatgagtatgttgtcagggaaagctgcttacgatctctttgtctatggcagtctccaggaacccgaagtcgtatacgtgcttcttaatcgcgtccctgaccatgtctccgccgtactctccggcttgtgcgtttatctctgactctatctgtcttgatttcgttcgtttttggatccaattgatgttttgattaacggcgattctgggatatcagtcacaggtttagactcaaaggccgtgtctatccaacaattctaccggacggtaccggaaaagtcaacggaaaggttcattaatcatccctgattccctttttcacattcgtttctttgtatgtactatgtatgtagaaggatggaaaacactaggacaagccatagaggaacgttaaggccattgttcttttgtgttattgtgtagagacgattttgttgccctccttgtttagtgtatactgttaatattgagatttttcaaaattttgaagtactgtgttggtcttgcaggtgctaaagggcataacagatgatgaactgaagatgttagatgagtttgaagatgttgaatatgacagaaagactgttgaagtaatgctgacggtaattacatttttgactggaacaactaattcttacatattggattaggttttattaagataagattctgattaaaaccttttgatgctttgtcatctgcaggatacttcagagaagctgcaagtcgaaacatatgtatggaagaacaaagatgatccggatctttatggagaatgggatttcgaggtttgtaatcttataccatattctagcttattgtttttagtctgtgaaaggttcaaatctttataaatgttcacactgtgttaggaatggagacaacatgacaaggaagatttcgtaacagcgaccaagaagtttctggaaaataggagattaccagaagcaaagacgaggatggacacattcaaaacattctttaagcaggatcttgagaatgggaaacctctggactcttgatgatacttgcacttatactagagtgactgctattgcttcacttgaaataagacttgtggaacaatgcttcttggcatgttttgaagaaatcgaatgttcatgacttttgtgaaactactagcgagaactgaattgggcttgcatgatcatttaatcagacgaactcgtatgagttatgatttgtaatttcattgaaaagttactgtgtttttacaaatgatgagtgccttagaaaataagcatatctattgtttctctaattgtcttttagctcataactttgaataccaatcttcttaaaagcagtaaactatgagtcatggacgttcagtcacaataaatttttaagattccgaggcctatggtttgttcatgttagatctcttgctggatcttgctgtctttgatataacctgcatttccttctagttgctcatataatcataactattcagtatcctcgagatcaggttcaggagatgattacacatgtgttattgagtgattgctttagatggtggtaagtctcagggtgcagatgtcatgtgacttttccgttttatcagatctcactgcttaagctttgactttgaccatcccttaaaccaggtgatcacagaggacatatcattccatgaatgcctccttctctctctctcttgaatcttgattgattttgggaggataccaagatcattccttttcgattttgccgtactctgttaagagactaatcgttaattgcatgtgactctgttataatattcactaattaagatacttattatagcattagtttcggttgtaaaagcataggatactgtacgttgttaatctaaatagtttaacaaccagagtctctacttgatgattaaaaagtacatttccgtaggtactcatcttcttacactattatttttattggatgttaattactctagtagtttatgttaactctgtgattacttggcataactgcaacatcaatacacatggctagttcccggaaaaggtgtaaaatgcataacatgaaccttttgctttcttttttttgtaacaaagtctcctaagcctaaccctggaacctaaaactgccttatgaatagcaaatttgtcaatggcttaagttaagtctagccactatagtatacttaacatggcaccaccacaagttggttcagtctttttaattgatatggaaatttaggctgttttgggtctgatttctacttaagagtttaaaggacaaacgaagatgttggaaaaggaaactgaaacctgtaaataaatttgcttaaagctgtaaatcattcttacactagccatgtaatacattctcttctagagttatctactgagatgaaggattgacttttatgatatttcaaaataacagatatctttaaagggggagattgtattgtggtcttacatttatatgtttcaaatttcaaccaaagaggattgtttggtctgtttcaaatgatccgtttgtacattccattattcaaaaatctctctatatctcactctttttctcattgaagttgcatagtacacaaagtccaaacccccaagggaaaaagtgggaacatggggaagaggaagaagaatggttcaaagcaacaagcaaatcaaaacataacaaaaaaaaactatctgcacattgggctgtgaggttggtgagatggtgtcctcgggcaatccgaaggatgacgataactcatcacttcctcacttgtggcattgaatctgcactcttgagtggtcaggtacgcatcactcttgttgtcctccattatcttcaaaatgctctcgaacacagcaacttcacaaggaatcctcaagataccagcttgttcaaacccaaactcttcttctgcttcacgcaacagcacatggaaagcttggtggctaaggtactctgttggtatcttgtatcttttctcctccttccccaccgagacagctaagtagcctttaggaatagctgttgtgtctgtgaaggatagtgttctcttcagaaacttgatgctcttgcttccacttccacttccacttccattgttgttgatgttgatgctgatgttgttgttgctgtcatctacgttgtcgatcttgttgttgttggcttgttttgatgcgtgtgcaacttttcgccatttcttgaggatctgttgaagcttaacgatctctctgattttgtttgacttcttggcctccatggcggaaactaaagaagaagaagaagaaactggctctgttcttggtgtttctatctctgtgtgttgtgtaatggagacatggtgggtttttggagattagggagatatatagaggtgctgatgacatttgggaatcttgttttaattaatttatagattagttttgaaattaaatgtctaaaatattcgactaaccatatgcttttgattttcttattaaccaagttggaaacctctagttaatggtattacatcttgtttgaccttctcttaacttaagtcgttattaaggccatgtttgtttatgcttttggaattgcgtttcaaattcgcaagtacttaacacttttgttattgacaacaccacaataaattcagatttatattctttgataacaaaaaaaaagaaaagaaaagatgagatttatatttagtttactctttcagccattttatcgtcgtaaaaattgtaaaataaaatattgaatgcaaaatattatttttatgtagaatcctaataagattttcattcgagatgatgactctttctgttcattcatttcgaacaaattcctactttcttttgaatcagttacatttgtttaaacttattggactataatatcatcggatgaaatgaattatgagcttttaactaagaatttggtactgagtgattagtctatttctgttacatattaattaatgttggtgcgtacctaacatttttcatattttacatctgtgtttcatcgttttgatccacatgaataaataaataaaaagtttatatttatacatatatctttgaaacaaacaaccctgttagacttacgttctttctttacaatatttagttttaaatagagataaattacatatggtctacctaaaatatacattgaatcttgaaacgataattgtttacttatagtataatagaaagagaattttaaaatagtcttactgtcatacgtactgaataaatactagaagctaaaagaaataacttcgaatgtaagaaagaaagtgaagtggtagtgttgttgtggtcagagaaaagaaaagaaacacgaaacatggggaaggcttcagtttccaaagcaaacggcttcacacagtttcagttcacatgaatctaagcagttggatctcccacactcttttccttttccaaaactatatagtactagtatataatagaatttagatttgcttttttcctaattttagtgttaacgacaaaaaaaagagtatttaatagtattattagtaatttacttttaccgacgcatctcagaagttccaattcgaacaaggaggagtaggaccgtgccggtaaagagcctcagtttccacgttactgttcgggttttaactgaaccaccccatgtgaacttttttactgttcagattttagtttattgatagagtggtgtttatttctcctaatccgatcattttattttccaaataagaacagctttgctttaatccatcggtactaatatataattcggtgatatttttacgatataataaaactagaggtttaagaaagatagcatttctaagtaaatcaacgaagagaatttgaaatatatatacccaaaataatgattggttacaacgactaaatcatatgatttgaattatattcgaattggtttaattttcttatgatatcaagaataaagtcggcttattattacataaaatgcatactaaaaagttgacgccgatttgatatattaagaaacttatttttaatgcctgcctattcaatattatagcatttaagttttcagactggcgatcgttgcatgcatgtgctggtgatgaactagcggggaagcaatgaatatatcagcaaagattacgcataaagcatagattattttataaatttaaataataatattattttatcaaaatatattagtactgtttataataacgagtttattaggctatattatataaatggaactgtaaataaagaaatcattaaaccccaaaatttaactctaaatttgtgattcggcgactaacgttataatgcaccagaaatatcattattgaaatatcttactatttatcagtagtttggttattgtcacctggtcttatgttgttgttaattatttgatcatcattagaaaagaatacaagtagtatagcacatacgtataataattttagtgttgtaaaagatgtagttgaatatgatgggtcatgggtgtagcaagtagcaacaactatattaaaactaaactaatgaatatttgttgtgttaattatcacataattatatgttgttttttagttttctacaactcgcagacgaacatattcgggttttaacttggattaaaagtacgtagtagataacaacacatatcatatacttgatattattatattgagatttaaattttgaaaaaatgaatgtgaaagtttaatcaattcaccggtgggtcaactgctggagaaagcatcgtccaccgatttttgtctacccccgtcgtcgtaactgctatccacgagaccataggccaccaatccaccttatactttaacattaaacaatcaatctctaaatgattaatacgtggtagtggcccgtacaacatggcctatatcacaatacacgttcttccttttttgtacgcattagtaaattagtttttaaaataattacttatgctaagagtttagttgctccaaattcatcaaatgattagatacttacttcgccattcgagtactatacgagagttctataatcttgaaggggttagtaggttgtattccgtacatacttcatgatattaaaaaatgtaaaacataaattaatgaaaatatgaatttaattatgttgtaaaatggtactaaccaccatgaagagacaaacataaatgattgagcacctatgaataattaagaaaatgtaccttaattaaaatcggaaaaactagctggcttttattccctgatttctctacgtgccataaatcaataatgattttcatgattgttattggtttagatgattaattatttgtaaattgtagtatataaaatctccttattatatgatacacacttcaattccgtttaattttaacatgatcatgcatttgcctttatttgatctgattgccaatgtcttcaagatttgatttgctgttttacaaaatggataaatgtatgatacgtacgctagcagactaaaagaaggaaagaatggatgtataataacacctcagcagtgaaaaaaacccaccttcaaacaatccattcaaggcctcaacctatatttgctgataaaaggaaaataaaagtgaagaaataataacgatatactaccaagtatcctacccaattttgttgctgaacaattttagctttatcatgtctttagctacctcaataaagaaactaggccctgaaggttgtaacaagcaaatccttttttcttaattgaaaaccctaattttacaactccgaagcccaaattatctttgtactttatattatactgggctataataaacggatattaaacacacggttttttcagagacttttgaaagttaataactcaaattaatggtacccaatgaaatagtcgcgcagctgcaagtatgtagacgtgtgtcaagtctccaaaagaaatggttaaatacgtcactatgcatcagtctatttatgatttaaccaaaagcatggaccgagtaacatgaaagtcaagacaataaccgattaccttttattagaaaactgtctatatcctcaatgaggtttatctccaagttttccatctttctcaaatacggtgacgttttttgacttcgcatacgaccaaaatttctaactatactatactatactattgtgattgcaagatcttctttcgtttgattttggtttcttgtgattcaaaatatgaagattttatgtagaacgattttttttctttttctttttataccgaactattctataagattgcgctgatacttgactcagtttgagatttttttttttctttttttttttgccaaacatacatttttcaaaataaaataatggtccaatgagtttcagagtttaagataaacttattttacctgttgataaaaaaattccttttagtttcacttttaagacttaagttgccaaagaaagtatattattactgatcaacagcattacttttaaaattgggttccacaaatgagagcatataattccttatgtgggaaacaggattcgatcatcaacgcctaatacacacaatgtcggatctgtggcgaatgactaagccaaagaacaatgacgcattatcattaagtcgatctccaagcaacaaaaaaaaatatgattcataccgtacgtctatgcaagaaaggtttattttatttgtcagatgagcaatcgatggtaacacaatttttgagtcaattcgttttttttttcctgctggaatgcatagtatttgcgtatttgatgatctttaagataagcacactctaaaaaacaaactctagtcctctcagaatagatatgaaccgaatgtataatccaatcacttcgttggtatataaagatacttaggagcacattgcttatgggacgaggcagcaaaggaatttgtctagtgagggacaagtatctaaaaaaaggtatacaacgacacatcgtttagtttagcttagtaagcaaatcttcagatttatttattcacgattttatgctacatatctataaatctgacacgtacgcattaaagacaaacatcttatgctactatatatgattaatcatagacatgtgctataattaacccttgtgttctaaatatgtgtctctttataaaaaaaaaatatatatatatatatacttgtatatatcacatatgtgaaattgtctataataagatttatttttttttggtaaaattttaagtaataagtttatatttgcgattttttcttaccgcttttaactattccagtattgtttatcacttttttatacatccttcaaaaatattatatcgtttgtgtcaccgatcgtatatatgtcatgataatagtttttcttgttcattatgtgatgcataaaattcacgtcacacaatttgacaggatatgatgaaacagttttagtgaaaacaatcacaaacattgatatgaaaaaactacgtccaaataataacaagaacgcagccaacttgcctattcaagaaactatagtgctctataaataatacattttgaaattattaaagaacccaatatatatattcctcgatgattgatctagcttttgaagtttcctttagttctaactaatgaggatataaagaaggagcactatcaagtttgaattacaaaggactcaaattaggaaccaagccgcacttcccgtccaagaacgtcacaacaaaattaagcttgacactcttaaacaattattgcatctctatttttactttattctcattttgattcgtcaaatatagcaatgacagattcaaaaaatcagtccatttctacagctaaaatactttcaagataattagaatcatgtaagtataaccacaagcatggataaaacagaaccaaagttaaaccaattcatcaaaatgactaaacaaactggccccttttcatttaaaccggaacaattcttgttattcatttaagaattaactggtagtttttgtaaaaaaatgcaatttattagatgaataatgtcattcgttttaatagaatgttcattgcaatgctgtcataaatgaaataaatatgcccattcattttttctgcgtttggaaagtggaagaatttttcaagaggatcggtcattcatgcatgtaatgatgcaacggaataagaataaccaaacattcgatcgaaagtacttaaatacctaaatgtgcttgtcttaaaatatatctaagatataggattcaagatatctgaatatcatatataaaaaatgaacatacagatacagtgaatatttgaatttatgaaatatgggattgctcgattggaaaagtaccatagtccattagtccgagtaaaggttttaaaagcttatccgaatctaaagaaatgtacgaattttggcttagaatctcttaattacaacaaaaaaaagttattaggtattaaatttttcacctgatattggtgatttgctatatacatctgatttagatagaaaacaaaagttatactttgagataaatccaaaaccctatattctggggctctataaatgttattaattaccgtctctttgtagcgcttactccacacaaaattgtaatatttaaaagatttaaaaacaccaaaaagagataagttagtgtgaattgtggaagtaacagctagaattccaacgtgaaggacgatagtgaatgaaacacccaaaaccaattaaacttagtcatgatgagagggatgcatgaaactaatcggcgatggttaaaggtcagcctcatctcatgtctgtgtcttatctcatatatgataatcacccacaatatctgtatatggtcctcgtcagatttcactcattttgtatcctcgagaaattatgcagtactactagttacttattggcagattttttattgctccatttccatagtatatataatatcatttaatttgtaagatatattagtgtttttgacaaaaaaaaaaaaaaaaaaaaaaaaaaaaaaaaagaagaagaagatatattagtgttgtctatcaacatttatctgtcggattcaccaggtattaggaaagaagcccgactatttgtttcgaaattttattgtatgtcacatgaatacgtttcaacgtgatgcatatgttattaatgtatacatagatacatacatcatgttgatatcctttcaagaatatctagatcataaattcataatagatatgttcatagctagaattagaagaatactttactagaaaatgaaatgaaaatgattagctatctgataaaatgattaaaaaaaaaaagtctactgaaggaggatgataaagtttaagtgttgagattttattcaagttatgtagtatacaaaaaaggggatagttttagacttttagtagtacgaatagctaatcttctaaattaattgctatctattacactacactatcaataactaaaaatgaataaatctagtgcagtttattcaataaaaatgtcacgaattttacataagttgtaaacatccatctattaaaacataatcacacaacatctattttgttggaataccataaacttttacttgacggctacataaacatgatacatgattaacataggccttttaaaaaagcaaatatatatgactagaagaagaaagcaaaagaaatggtagaagacagaaatcaaaagcgtgcaagaattatatatactatgatatgggctccaactagagatcacttgttgacaaagaagaagaaaaaaagagagagagatcactttggaaataacaatggcgaacaaaaggacaaatatatgccacgtcatccctctccatccacctttatgtcatttctcaaaaaaacaaattttttttatccgattcattatcaaaaaataaaattaaaaaaaaacaattattttaaattatttggttagtgtttcattataatttttcttataaatagggtctttaaaccttccaagaagtcatatagaaaacggcttcataaaaagaagatagaacttggataagtttagaagatagaaatggaatggagagaatgttatttagatgtgatattggtgccgctagggctaatggtgtatgcatcttaccatgtttacttgtggcataagttacgaacacagcctctcaccactatcatcggcactaacgctagagctcgccgattctgggtcgcttccatcatcaaggtaacttcaattttcttatataaacatcttcacacacataaatatatgattttaattttatgtatttgattaaattaggacaacgacaagaagaacatcttggccgttcaaacgcttagaaactgcataatggggtcgactttgatggcaacaacatcgatcctcctctgcgctggtctagctgcggttttaagcagcacatatgcagtgaagaagcctctaaacgacgctgtttttggagctcgcggagagttcatggtggctctcaagtacgtcacgatactcaccatattcctcttctccttcttctctcactctctctcaattcgtttcatcaaccaagttaacatcctcatcaacactccttttcctcctgaggagttggaggacgagatgatgatgaccgcggaggagtacgtggcggagttgctagagagagggtttattttgaatactgtggggaatcggttgttctacgcggctttgccgttgatgctttggatatttggaccggtgcttgtgtttttgtgctcggtcgtgatggttcctctactttacaacctcgatttcttcttcttcggtaaagaaagaagaaaacttgatcaaaagtctagttttggatctgtgtaaaatcgagttctggtcagtagaacaagtgatttgtaattaagtgatatcatcgtcctctttgttaaatcctggactaccgatgaacgcatgaggactttacatggaagttgaaaagttcgaagatcatagtttaggtttcaattctagatcttccgattaagaaaaaaaaatgtaattaaataacgcattataattttcatatattagggtttttcggccgtatgtatttggtgtggtgtaatatatgtcacgttttggtttattgagcgttattattggcatttccatgtgggtgactttataacgtatcagcatatctcacagctctcttggtatgtacgtttctcttttttctttttctttttctgttagtgtttatatgcatgtggcttacgttgggcaagaaacgggacaaaaaatgtgatgttcacatctattccgtgcattagtatctgtcttattaagttttgttgttatgttatgtgttaggaaccagtcgtcacgaggctatttaaatcctccctaagacaatgtagaaatatacctacacggttatttttctgtgtagtatgaaatcaaactgtttagaactcgtttagagatgacaattcagattatgatgttagctaattatatccgaatctagttctgaagcccatgttcgcctagattaaaattgtatcattgtatgttaactaactctatttttcatatatatattttcaattttggtttagattaggtaaacaaaaagctatttcatgctacaaacaaatacaattttagtgatgaaaattttcgtagttaaaactttagtttcgtacgtagctaaatagctaaacgacagttgctaaataacttactcgtgactatccgttgatacacaaatttcatggataatagctactgaccatttaacaacgagatagccagagatatatcatagagatagccaattaaactgttggcaaaagtaccatgggctgtccttaagtgggcctaaatctaataaaattataaactgtggcctgttaggcatgtgatatttttctctttttcttcaagcctttttataaaaataaatgtcaagagatgatgaaggcatttgcacttttgaagaattgaagtaggagctcaaagcgaaggattacgatgatagacatctctgtaatgatttaacaaaactcaaatacaacatcaagtttggaagatcactggactgttttgtgtttgatcatttactcacctgtaattcttttttactaatatataacttataagaaatcataaactataatcttttttttttttgggtttaatgagacttttttctgtcctttttttgaacacctgtgaatcatagactataatcgaacttcatccccttttttttttttttgggaaacttagagaagaacaaaacatttgtgaggctgatgatttgatgagaccgcaacgttggagaactttggagtatattaataatatacattttcaatattatcagtatatgcattttcaactaggccttgctttatacaccggagattataattaatgaaaagatgaattacgttaatgtcattgcttctggtttgagttggcaaactccacgtaccacgtacatataattattattgagtagttgctaattaattatacttttgtcttgttaaaactagtattataaattggttaatgccataaagcaaacgatagaccagacacatctctgataatccagcggtacttatttgtcatgattctgtgatccaatcaattaatcgtatagatttagctatcgcgaatcgtgattccaacctttacataaattctttttaaattagggcaaattgtgttggatcaagcatagtaataacataatacgtacttataaaattgttaacgtgccggtgttgtttggagagaaaaacaaagattcttagctctcaggcaattaaaaaaacgagtatcgaaaaattcagaatagaagttgcttagttaacgagaaattaaatggtgcatcgaatatctaatggtttaatctggatatagtaaaattagtactccacgattagttagcaggcaagtagatgaatgtcattaatttgatgatctgattgaattgctttcgaaaaaggacaataataataatatcgactggttaattggttgtcatattttacccaaaaaggatcaaccattggatttacgccacgtcattaatgtgaaaatacaaaagtggatccgatggatgccgcgtgtcatcgtcggtcacgacatacccacgaagccatttacctcacgtttagtaccatctatctctctctctctcgtcttggcacgctgtttctttttttcctactggttaagaaatttctacggtccatggtcaaaaacacaccttcataaatatacagagagatcgtgagagagcagagaggaaacgtttctcttgttcgttggaatctccgtccctttttgttgatcgacggtggtgaatcttagacatggcggctgcgaagctcgtcgctttgttacttcttgccttgcttttcaccaccagcgtcttcgccgatgctgatgagccggaggtttctgaggctgccggatccgatggctcttccaagatccacctggatcagcttaatgccaagatccgtgccctaggttagttaccgacttgcattgttcagactcttccatctgatcgaatgattgcgaagttttgatttttattcgactttgattcgtatttgaaatcggaatctgcagagttcgcatgttattggtctgacgctgatagaattaccgtttcagctacttgatgtgtttctctgttcttatagcattgacttaaattagtagcttttggatcgatttcagatatgaatcgtattaacttgttcccaatgtcgaattgcttgctatggttttgtggaatttgtgaaatgcctaatccgttctgattcgagcttgttatagcttgattatttggtgaatgcaaattttggggtttgagctttatgttttgtttttgttttgttttgaagaatctcaaatcgatgagaaaacccgggaagttcagggcaaagacgaggtagtagcagagaaggagaaactactcaaagaaagggaagacaagattgcttccttgcagactgaagtctcatcactacaggtatggatcttatatggtttcagtttcatctacttttttttggaacttgtgataaaaaatttctaatctttttgacatgtttggcttaaatctgatctgtgtgttttcactcatctccagaaaaagggatcatcagattctgcaaaacagttgggaaaggctcaagcacgagctgatgaattagagaagcaggtgaaatttttaagttcaaaaactcaatctatttatatggttagaatttgcaaacggttatctgatttttgcgatcctactactgtcgtttaggttgaggttctcaagaacttcttggagcaaaaaaacaaggagaaagattccactgaagctcggactaatgaagctgagaaaaaactaagggaacttaactcgagccttgacaaagtatatttgtttacatccctcgtttcattttttgcattacaccatttcatttgttttttctctaagggacatggtaaatgcttagttacgtttttttttatctcagctttagctagactttgtttaaggttgaggtcaaaatatcttcatgttctaagcctcgtcatttatgctatgttattagcattgcaatttccgttctcagctatattagttctcattaggacagctccttggatgatttgatactcgtgtttgatcttaattcgatcttgagttgtatgagaattatatagaacagagtttcgttatgcagtcttattataccatcagaactttccctccttcttactataccatcgaccatgcttttatggtcccttttatggatatgtacttttggttgaaccaattcttatagtaatgtcctgagacatttaattatagtatctgatgtcttgcagcttcagaagacaaatgaagagcagaagaacaaaataggaaaacttgaacgtgctattaagatagctgaggtacagtaacctcttattaaagtagatttgcctcacatatagtttttttctaaattttaaatttcaggaagaaatgttgaggacaaagctcgaagcaaccacaaaggcgaaggaactgctagaggtattagtttgacacagttttacatttggctttctctgatgctattatagcattagattttcattgtgtgggaaattagcggagcctggaatctggaagtcggcagaaagctaatgtcaattgttttatttactcaggctcatggttcgtggcttcccccttggcttgctgttcactggtttaaatttcaggtaaggtttatgctggcctttttacagttttacaacatagtagttatcccccccaattaacatagggaatttcatgtacctatagacttataccgagacacattgggaggcccatgggaaacctgctgtggagacagtaattctaaaggtactgtttaacttttgtcctatactcctattgagatttatgcctctaaacagtatgagagcatctggctaatgaagtttacttattattgagtaggtgacggaagcaaaagctcaagctgaaaagtgggctgaaccacatgtcgaaaacgttaaaactgtaagcatcttattggcaattttttttgtagtaaatttctttgacattaatggaatgcctgcatttttggtgaatcacaaatctctagagttataattggctcatattactatgtcttatgacactacttgcagaaatatattccagccatcaaggaaaccgttactatacatgttgagccacacttccgaacactatccatcaaagctaaagaggcttaccattcatcaaagagtgctgtttcccctcacattgtcacggttcaagaatttgtagacccctattatcaggtatagtgtctttttcagtttattttttcactgataggtttggtacacaattaatcaactagtatttacggatgtaaactttatgcctgttacaatttccaggaggccaaaaagttcagcaagccatatgtcgaccaagtggccacgaccacgaaaccacatgttgataaaatgaaggttgccatgaaaccttacacaaccaaggtgatcatcgtctatacagagttccttgaatccgccacaacttatcacaatcaggtctgaaaccaaaatcctgctaatgtatactaaaaataaatctgagttattccacttctcggactcatcaaaaagtatgctcgacttgtaaagctaaaatctgtgtttgtctgtgaaggtccaagcccatgttgaacgaaaactgaaaagccatgagctgacggagccttttgctaccaatgagtttgtttggtttgcggtattttgccttactttcttctagaacgtattctgagaatgcatcctttatttgtttcctctctaacttcaaatctaaaatctatgcactgcaggcctctgcattgttggtatttcccatcttcgttgcttacagagtgctctcttctctcttctggcaagtcttttaagtaatccatttagtcattttatgtaatattcttaatcataaaaatatctcatattattgtttatcgcagcacaaagacaaagaaacctgttaaacaccctcatcaccatggtcgtcgtaaggccaaaagggctcacactgacaagtgatattcattgttccacgctctcaaaatagtcgaggtacactctcacgtttaacttttgcttgacattagccacactaaggaacatctcctctcttaaaagcattgtagttacgagttttctagcttccagcctcagaggaaatcatgtagtctagttagtgtgaaaataaacaaatatgtagtgttagtaacagaaccatactcagattatggaatgtggttttgagtatctgatgccacataacattaggtgcttcattgtcgtttcttaatctgttgcttcttaatcgctccaggtcacgaggttaaaacgccattgttgttggactgttctaaagtcagctagctcaccggacaggttgcttgttgaatgaagggaaagtctcgagttggtgtctgatgggtttttagaggctcgttgtgcacaagtgttgacttctttcctttattattttgtattgttttggacaatttatttcagcatttttacacagaagattagacattactagagaaattctagcaaaagcttggttgtattttagtgtatttttctattttacgtggatatatattgcgatatctttaatttcattcgaactctttcttttgcaacttatctttatgcttaattcataatttcttataattccatcaaactctagaattattctttattttcctcaaattactttcttacaaaatgaactcttggtctctttaaaaattcaccagaaagttttagctaaccttgaaaaacacaaaacgtggaagagataattaagagagatattggtactaacaattcatcttaactagatacagtagtcgagaggccaacaacaagtcttgggactcgatttgagtcaagaaagaagcatgtatctatcttaaaggcactttaacgtttctacttccacttgattttcttgtttataaacatcgccacttccacttcctctaacaccccaaagtcacagcaacttggtgcaaaaataaaatggcgaaccccaacgagcaagaaaaggcaatgagaacgaaggttaaatggaaaagattcactgagatggaagtagatatgattatgccagatccatctccaaacggtaacatctatcactccgcctttgagatgaatgccgcaagaaatggtttaactgtcccaccaaaagcaagagctatcttcggttacttagtgatcatgctttacaagaatgtcaacgaatcaaactttagagaattttctaacaagcgtttcaaagcacttcgtgctgtcgctcatgatatttcagatggacatatctcagtgttcaatgatgtggaagatgctatctgctatcgaaactcgtatggtcagaaccatcagatccgtaaagctgttctgagtgctgtcctcggtagcaaaaagaatgaccactgttatttctctagtgttagtcttaatgttgctaaattcctttcttggacagacatggcaggatattatgttgtcgaagaaaatcttgtttatcctgattcccctgttctcaaagctcctgagttagcaactgaagtaagcaattggaaaaaagcagatcaagcaatcaaggaaactgactcgcctgagtattacaggatcttgcatgaggatcctgcgagctgctctatacttagaagagcaaactttccgacgctcattgctgtcgcagagaagttgaagaatagagtgcttggtggcagcaacaaggtagtgaatgcagagatatctgacaaagtagactactattttgatatgcatgtcaagtagtacgcttctggccgagtgtgcgaagccaccgagcgtattgtcgactactttgaggaaaattctgagtcattagcgaagcttttctgtagttagggtctgattctacatggcgtcctgttttttttttgtttttttttttcttgtgcaccacatgtgtttaatcagatattttagtatgttgctttgatttttatttgctgtcttaaacttcattaaaaaagaattcaaggaagagattcaaaaacagaaatacaaagcatgacagttcaaaacagagcacaattgctccgaatatgtaaaacatagttgagactaagtaacagttagcccaaagaatttcttcactacacgtattgtttatgaattctaagatttcttaaacctaaacaaacctttcttgggggaaaaatagtatattcttccatgtctgtccaagaaagaatattggccacatatgaacaaatatcaccaaaagaatctccatccttggtatgattgagaaaacctttcaggacagcttttccgatctcagggttctataccataggtggaccgtaagtaggtcgagtgatcctcatcattgaacactgacacatcttctcctttgatcggaacataaccagctgcatcaaaaagtattctcatatgttgatcagagctgacttcagtgtcattcttgtaaagcatgatcactaagtaaccgaagagggccactgacttttttggttctaccaccttttgtgggacgattaaaccgtttcttgcggcagctgacgggaaacttatcgttcgcaccgtacgacccattgcacgaacagcttgttgcagagcatcagttacttccggcagtaataggtcgctctctggtccctatcggtcaggtattcattctttgcacactcaagactcaactgaaacgccgcataactgcgattcgcctccgttgcagcagacgcatcaccaagaatcatatctacttacatgctcatacagtcatacttcaaataaaaagattgaaatcgaaagagaactacttttgtttgttggctttagaattaaaagatctctataaatttagggtttcagtggagacgttttataaatacggagtagaagttggaacgttgatttgagagacgtggctcttgggctaggtacatgcatggactcgatcgggtccatgctgacttgtctttgcagtttccttctagtgaaaacgtcttgccgtttatacattcggcggggttaatgaaaacggagtgttgtgtcttgtgtgcgtgcgtagttcccaaaatacgacatcgattctactttctactagtttttaaaagcttttgcagtgcacatttgttaatacataaaggtaaagaaaactaaattttcatatatactcataagcatttaattaaattggacatccacaacaatctaatttgttgtcttttatagtgtatagttttctgattttacaaatctatctcatcaaagtcaattcttattgcaagaatctctcttgctttatttctcattaattttctctttatttatttttccttggaagttggaaccaagtaattattagttgttcaagcctctctaaaaaaagataaaaaaaatatgagttgtacaaaggttttttgccaaataatatagttggtgggattaattaccaaaagaaacaaaaaattaatatgggattatgagttaaaaaaaaaatacttgttgaaaattgaaaaaagagaagtccgttcgttcctcatttggagctacagtgaccgtttctagtgctcacagagagagagagagagagagagagagagaggcgctgtggatttgtgggagagtagggacatcagaggattcttcgatcttcagattcttactcgacgaatccttaatcgctcacctgcagttgttcttatcctccgcttattccgtcgagtgccgtggcggccaatttcggcaactctgcgccactgatgattttgatggttagatcttttaatgttcgtcctcctccttactctccgaatccattttctgtgttctttcctttctgtttcgtataaaatcatgtttcattgagctcgattatgattatatcttgtctacggtcattttgacgacgacgacagtgatgatctttgccacgcgcatcgaaaattgaattttgttttccccattttaggaattgagtcatttggatgtggttcaaatgatatttggtggttctgtttttgaatctcgtattctcttggaatatctgtatacaaggtctcactggttaatgtttcttctcttacttctgttcagtgattctaaagagtgagatgttaaagcagactataagatggatttgatacttcatccagtagtagcttaagaaatattgcggttatgtcagagtctcgtcaaaggcctccttttaagggcccgagatggattatcactttggttgttctggttacggttgttgtcattaccgcattcatatatcctccgcggaattctgtggcttgctatatgttttctggtcctggatgtcctttataccagcagtttttgtttgtacctactcgggaattgactgactctgaagctgctgctcaagttgtcatgaatgaaatcatgaacctacctcaatctaagacagcaaatcccaagttagctttcatgttcttaactccagggacgctgccttttgagcctctctgggaaatgtttttccgtgtaaggatttctcattacaatgtcctttaatcagttggagtttcttagagatgtgacttttttgtcaaatgtatttcttgacgaaatagtgatggttcctttttgttgattcagggtcatgagaacaaattttcagtttatgtgcatgcctcaaagaaaagtcctgtacatacaagcagctattttgttggtcgagatattcacagtcacaaggtaaatgagtttggttacaccattcagtcggttttatgcagaaattttgattagtagtcattcctacatgtagctttattatgttaatcttgtgaaggttgcttggggtcagatatcaatggttgatgcagaaagaaggctattagctcatgctctcgttgatcctgataatcaacactttatattgctgtcagataggtgattgaatcattgttactttcatattaaatatcttaaggtcttgatgtaataccgaactatcctacgcttaccatcttcctccttgttatttggcagttgtgtaccgctattcgactttaactatatctataaccacttgatcttcgcgaatctcagcttcattgattggtacgttgtatgattgtgcctacaatttactcatgcggttgaacctcttttatgtctcactgtcatcctatcttctctgttattaactattaagtatcttcatcttgcatttttccagttttgaggatcctggaccacatggatctggtaggtattcacaacatatgctgcctgaggttgaaaagaaggattttcggaagggctcacaggtatgcgttaatgcgttatgtgataagatatcatattttcccctttcttcttcctgcaaaatgtttatattagaagtttgtaggagggatttacagttcagaaaaaaacaatggtcaatgttattattgtattcatcgatgttacctttcgtctctccctgctatctaaatcatccctcactttgcttctcattcctgataatgatggctgaatttcttttcccgttagttctatataaccttgacatgttcccgtgcgtctttataatcatctttttcagtggttttcaatgaagaggagacatgctatagtcgtcatggcggacagcctttactacacaaaattcaagctttactgtagggtaagtaagccttaaatttcatgtgttctcatattcacatgatatttgtttataaccagccagaccatatcttgtcgtatgtcctaatattctatctcgtgacactttttgctgcatatctcccataatatttgtgctctgcatatttggtgatcaactaagtcatctagtcaagttagcaagtggatgcccattgagattgtagcttattacaaagtggttatgctgtgtgatgttcaaacaaaactcatgtgttttcctttcttatcgcatagacacgatatgttggaatactgagacatcagacatgttttgatgtcatggaatttcactattgatctctaatcgttagcatttgtatactaagcagaattttccttatcggcttatactaatttttccacagccaaatatggaaggacgcaactgctatgcggacgagcattattttccaactcttttcaatgtcagttgtactgcttgcttgcgtcttccttttattacccttaagccttaaagtactcattttcctctaacttcatcataatctctccgctcatgatctctttctttcagatgattgatccagatggaatagcaaactggtcggtcacacatgtagattggtccgagggcaaatggcatccgaagctgtacaatgcaagagacatcactccttacctcatcaggaaaatcaaggttcctcttgttcttctctttctcaatgctcagttagatttttcttttctgcgatcttattttgtggttttaatctgatttgcagtccatccaacttgcttaccatgtcacaagcgatttaaaggtaaaacacccgagctttcttctcattatcatggttcttggaatttctgttactgatccataaccatcctctatgcagaaagtgacgacagtaaagccgtgtctatggaaaggagagcaacgtccatgttacctatttgctcggaagtttaatcctgaaactctagaccgattgatgtatctcttccctaactacacctcgctggtttgaaaggcttatcggattctcgattgtccggtttgttctttgttaagctcttaccaaagcatacaccttgtgtgataattattaggaccattcatattgctgtgattcaaagttgggtttgagcctggcacagacaagaacaagaactgctctggtgtttttttggtttatggttaacaaaacattagcgtgctagcatgcgaggtccatgacaattgttttaggtggtatgctagagttgtttacttcgtggtatcgagtaaccatgtggctatgccttttcttctgttagaaggtgagacccaaatcgctctaatccaacaaatagctggtttggcttcttattcacatacaattgcaccgttatctaatccatcatctgatgctcggcatcttttcaataattgtctttgtaacacaataatgtctcgaaagtccaaactgaatggaagttgaaggcgaggaggagctctcttttttcaactttctttcatcatcatttggagaagctatgagcttttatatggcacacttttaatttaaattgggctaacataaggcccacttttaataaatggaaactacaaataagtaaagttatgttaactaaaaaagaagaaatttggcgttacagaaaaaaggaaatcagccagctggcaccgccgttgtagtgtctataaaaaaggggaaggttatcagagagcgtcataatttctcagaactttgttttaccttcttgtttctttgtttggcatatttctctcgatcgctttatcatgacagaagacgatttggagcgataatcctctgtaagtaatcttctaattctcttgatttctagggtttctaaatttaattatcatcaaatctttctctgtttcgcatgtttctctcgatcgaagcattcatggccgaagaagatttgtagcgataatcactgtaagaattcttctaatccacttgatttctagggtttccaaattttcctattatcatgtttttgtttggttctcttttcgttttgcaaaaccaaacgaatcgcgactctgcctttcaaagtttatgtgaattaaagattgtttctttcttcttttttgtgttaggttttggttttcgttttgttttttttgtaccgctttattgttgcgatcggttgtggttttgttgctcttgttttgctgttttgtttgtttgatttcttcattgttttgtttttctttcaaacccaagagaaatcataggcagacactcaactattagtgttctgtcagattctttcttggggacattgtcccgtcgagttggcttatgagggattttgacctgagactgaaaaaaccgatcttttacccacggcttattattttgacaaatatacttgggattggtttcagtttacttgtcaaagatcaagttacccacggctttaaactttagtctttagacttagacttgagactgaacattgatccttcttggtacccatggctttaaaatctctagacatatggatcatgttcagtttcttgtttcagtttttagacaaagctcaagttacccacggcttaaaaaagtctttagacagagacgacttaagaaagtctttagacagagacttaagggacaaagttcggattgggttatgtttggtgcaaggaaaagagggtacccacggcttcaaacacacattgatccttgattcgaactttagacaattacccacggctttagaaataaaagtctgaacattgatcttgtttggtacccgcggctttaaaatctatagacatatggatcatgttcggtttcttgtttcaatctttagacaaagattaagttacccacgacttaaaaaattcttcagacagagacttgaggttcgaaaacaccaatctttagacaaaatactggattgggttatgtttggtgaaaggaatggtacccacgacttcaaactttagtctttagattgagacttgagtctgaacattgatccttcttggtaccctcggcttgaaaatatctaggcatatggatcatgttcggtttcttgtttcactttttagacaatgatcaagttactcacggcttaaaacagtctttagacagagacatggggttcgaagtaaccaatcctttaaacaaaagattggattgggttctgtttggtggaaggaagatggtacccacggcttctaacttagtctttagactgagacttgagactgaacattgatccttctaggtaccctcggcttgaaaatatctagacatatggatcatgtttggtttcttgtgtcagtttttagacaaaaatcaagttacccacggcttaaaaaagtctttacacagagacttgaggttcaatataaccaattctttagacaaaagattggattgggttatgtttggtggatggtaaatggtacccacggcttcaaactttagtctttagattgagacttgagactgaacattgatccttcttggtaccctcggcttgaaaatatctagacatatggatcatgttcggtttcttgtttcactttttagacaatgatcaagttactcacggcttaaaacagtctttagacagagacatggggttcgaagtaaccaattctttagacaaaagattggattgggttatgtttggtggaaggaagatggtacccacggcttctaacttagtctttagactgagacttgagactgaacattgatccttcttggtactctcggcttgaaaatatctagatatatggattatgttcggtttcttgtctcagtttttagacaaaaatcaagttacccatggcttaaaaaagtctttacacagagacttgaggttcaatataaccaattctttagacaaaagattggattgggttatgtttggtggaaggtaaatggtacccacggcttcaaattttagtctctagattgagacttgagacagaacattgatcctgcttggtaccctcggcttgaaaatatctagacatatggatcatgttcggtttcttgtttcactttttagacaatgatcaagttactcacggcttaaaacagtctttagacagagacatggggttcgaagtaaccaattctttagacaaaagattggattgggttatgtttggtggaaggaagatggtacccacggcttctaacttagtctttagactgagacttgagactgaacattgatccttctaggtaccctcggcttgaaaatatctagacatatggatcatgtttggtttcttgtgtcagtttttagacaaaaatcaagttacccacggcttaaaaaagtctttacacagagacttgaggttcaatataaccaattctttagacaaaagattggattgggttatgtttggtggatggtaaatggtacccacggcttcaaactttagtctttagattgagacttgagactgaacattgatccttcttggtaccctcggcttgaaaatatctagacatatggatcatgttcggtttcttgtttcactttttagacaatgatcaagttactcacggcttaaaacagtctttagacagagacatggggttcgaagtaaccaatcctttaaacaaaaaattggattgggttatgtttggtggaaagaagatggtacccacggcttccaacttagtctttagactgagactagagactgaacattgatccttcttggtaccctcggcttgaaaatatctagacatatggatcatgttcggtttcttgtgtcagtttttagacaaaaatcatattacccacggcttaaaaaagtctttacacagagacttgaggttcaaaataaccaattctttagacaaaagattggattggcttatgtttggtggaaggaagatggtacccacggcttcaaactttggtattaagattaagacttgagagtgaacattgatccttcttgttagccacgactttaaaatctctagacatatggatcatgttcggtttcttgtttcagtctttagacaaagatcaagttacccacggcttaagaaagtcttaagacagagacttgaggttcgaagtaaccaatcctttagacaaaagattggattgggttatgtttggtgcacggaaaatggtacccacggcttcaaacttagtctgagacttgagattcgacattgatccttcttggtacacacggcttgaaaatcactagacaaatggatcatgttcagtttcttgtttcaatctttagataaagaaacactcacggcttaaaacattataagtcattagacagagacttataattttaaacaatggaaatttggataataaacttacaagacgatgttaaactaaccggattttggatcccatcattgatcgttagcgattccaaaaattcagcttgtcttcccatcgttaagtagatttataatacaagtttctgttgatccttcttggtaccctcgacttgaaactcactacacatatggatcatgttcggtgtcttgtttcaatctttagacaaaagaatacccacggcttaaaacattatgtctttagacagagactcgaggttcgaaagtaaccaatcttttgtcaaaaagattggatttggttatgtttggtgcaaggaaaatggtacccacggctttaaactttagtctttcgagtgaactgaaacttgagattccaacattgattcttttggtacccacggcttgaatatctttagacatatggatcatgttcggtctcttgtgtcagtctttagacaaagatcaagttacccacggcttaaaatagtcagagacttgaggttcgaagtaaccaatcctttagacaaaagattggattggattggcttatgttttggttgatgaaaaatggtacccacgacttcaaactttagattgagacttgagattagaacattgatccttctttggtacccacagttcaaaaatctctagacatatggatcatgttcggtttcttgtttcagtgtttagacagagttggataataatggacgatgttgggttatgtttggataataaatttacaagaccagattttaaacaatggaaatttggataataaatttacaagacgatgttgaataaccggttttggatcccgtcattgatagttagcgattccacaaattcaacttgtttttacatcgttatgtagatttagaatacaagtttgtgttgaaaaaaaatatatacaagtttcttatttttttagaaaagattcccaaatttttccatacgtttagcatgctaccaaccttgtaagagggttcgtcgttgtgtgagattagtgtaatttgttatgggatcaggatcaaccaatcaagatttcaccaacttgctaatatgtgaaagacagacaaatagagtaacagtgaagactgaagatgatggttgtgatgtgatgaacaagttctaaaatatttaggtccaaaagatcttcccatggagcttggttgtgaaagtgctaactgagatttctccaacatgcacacattgttgcaaaagcttccccctgcattttattatacaaacaaacaaacaaaaatgtcaccataatggatgaatgtttgttcaccatgagtatgcgacttattaacatattacattttagcattactacatccaaatacttcaactatcatcatatattggaaatttggattgatggcttgagtcataaaaacctacaaaaggattggacgatacttttagtaaaatctcttaaaattgtccgcagtgaccaaaatgctaaaaagctagaaggatatacagacttttatcttactttatgtatcagaaaatcaatatttcttaataaatatgataaagtgtttcagtttattttgagtttagaaaaagccaaatgaattggaatcaaaataatgtaggtaaaaaagagaagtggaattaaaataaaatcattctatccaatcaaaacggtaagtagttgtgcgttttagaggcaaaacaccacagcgtttcgaagcacgtggatgtgtcgtgtgatacagcagtagcgcactattgggcattgagaatacataatcataacccctgcaatctaacggtcaaccttttaataacccttgtaggttaaatctctaccgtttattcgaattacttttccaaggtaagaaaaaagcaaacacaaaagggaatatcaaacaacaaaaaagtaagaaagagcggtaagacagagacggagaagaaggagaagaagattgttaagacgaaaccctgttgctgtccgtacaatgccgccgaagaagagtaaggcagatggagaagaaaaggcgaaacctttaacgacgttggcgtcgtctagagtgactcggagcatggacagtcgaactcgaagtcagactcaacaaaacggtgctaaagcggctggatccgccactaagccggcgacgaagaaggctaagaggaagaattcagcgattgagactgggagagccaagaagggaaagaaggaagaggaagttgaagagccagaggaagccgttgaggaggaggttgagaaggaagagccagaggttgaggaccctacgagaaccaagattgttatagaacactggtaatttttgcgtaaatgttttcgatttctttagagataatgtttggaatcataagagcaaaaatttaggtttttttctttgaaattgaatctaaaagcctacaactttggggtatgtgttgagacttgtgtgtccgtgtgtagcagctaaggtttatttgctagggtggaacaatgtgttaggttttcatcttgattctgcataagtttttggtttgagtgattagtggtttatgttttgctcgcatttgtgaagaggacttgactatctgctttctgtttgtgttcttgtcttgctttagctgaattgcaatgcgtaatggacgtgttcattctataaatggaatttgcttctatacttatgtctcacaagagttcttttttgttttgttttgtgatgttattgaagtaaacaatgcaatgctttcaagacaagagctattcaggtgaaggaagctttggagggagctgttcctggcgtcacggtgtctcttaatcctgaaaaggtaatgcttttactgcagatgaatatatcgtcatgaatgctccgttttgactaatgcgttagagcatacttttcacattatacttgataagattttcttctaaattactaattctttcttttgatgtgcttgaacagccaaggcggggttgctttgagatccgggaggaaggtggccaaacattcatcagtcttttggtaaaaactttcattctaataaaaacaaatctcaatttgtctcgcttctgcatatgatttgttcagtttgagtaaggtttattgttattactaattctcataacaccacttgctctatatgcatatgagaatgaaaatcaacttgatccttattcattacgagaaatgtgttattgtgagtagaaatcatgaatatgtttttgcctttcaatcttaacatagacctaaagatgtagattatgtttatctcattttgtaggagatgaaacgtccatttgcaccaatgaaggcacttgatatggaagaagtcatcgaggacatcataaagaaagtcaaatgaatctgttctttgtttctgcctcggtctcagtttaatcaattaggtttctgcagaagactttctagagtaatgtcagatttgttaggttcacttttattgtttcggtatgagcactgtaagtgcagtctcgtcgtttggcaatgcatgattagttgatagagaaggatctctgtagtttttggggttaactcgtatttgtaaggctagtttattattcatctcgttgcttgaagcaaaccgatgcataagtgttttttgttgttgggaccatgcatggttctaacaatctatgcactggttaaagcatgttctaacacaattagaactgtgttacaaaatcaataggacaaacatcacatttgcattcaaaatggctgataaatacaatgcatgatgagtagaaagctcattacatttaggtttctttcacttccaatggccgtgtctctcttcttggctaaaagctacagaaaaattgttttgaatctcacctaccattattgtctttaacccacatcacccgaatcttagaacccagcaaagctagccaaaaatgctaacaagagaataacatcaaagctccaaccagccttagaagcagaagaagatggtttagccttatcagcagcttcaatcttctcattatcggcgcttggagcaggagctggagaatcagcctctggtgtgtctgttgcaggtgcaggtggagtttttgggacagcagaatctggggaattgtcatcagcagctggtcctggagctggaaccactgaagcatccatgggagttggatatggagctacatgaacgtatggtggtggaggtgggaaaattgcaaggctgagtccaggagccactattggcatggtaatctggatgatagagaggttatatggattgtggtacaccgtcgagacatactcagcgtttaaaggagagttcttcacttccgatccaaagtaaactcttccttttgatttggaaacgttcaagaaaccattcatctgttcacccaacccggtggtttggtataaggtagtaagcattatactcttctccctcatcccctgaagcttaagctcatcgtagtagtcaagaataacatgagtcatgaggatgttcctgagctcaacttcggatctgttagtgatggagctgatagcgtcattgctaacagcaagcacggttatcgtctggtatttgtcgatggctgcaatgagcttggtcttgatgaagaggtccctcatggtgctgaatttggagtatttctgaaaggccagcgtgatgttattcgccgtaacgaccttagagaagacgagtaagatggtgagggagaggagagaaagggaggctttgagacccatctcgtgtcgtgtgttctctttgctaaacctcaagggcgaagagtgggtttaaaaggagagattttctctgtttttggtattaaatctgaattagtcttttggtgagctaagtctactctgctatttttagagtatagtaagacttggccattgagaatttaattatttgatggctaaattgcgttttaacaagtttttttatgttaattgaaaaagttttcttctgtgcgaaaggaactaaaattataatgatggaacttgcatgtttattagatgaatttatcattgtaacaaaattatagttgttttgtttacaatctgatgaagttttagttaatgatttctaaagttgatggaaaagataacctaaaagactcttaacatgaataattaaacactagtaatttttatttttgctaaaaaaattactactcatctacttattaatatcatcaattttttgtatgataattggcacatcgatatttagtttttggaaaccagagtaaatataaataagaaatgataaattatgattagaaaaagataagtattctgagaaagctaaaatacttttgaataagagtaacaaagaaatttagaatttagaatagaaactgtctatagccccgtgaaaatgacaagtaataactaaacgtcaattgcatgctatgttcacattatatttcgttttcgaaaaatttaattaatgaattacgtcaaagaggttttcacagttaatgccgcatgttcattaatttctaaactaaatatcatcatttgatggaaaagctagcttaacgactttgagtgtggatggtaaaacatatatttttattttttttgctacaacttaaaagcatcaatttattatgatattttggacatcgatattcatgtttgtaaataatttgcctcagaactatagagcaaaatataaattagttggagtttgcaaataatgataaatgttcttaaaaaggtaaataaaattaaagagtgaatcacaaaaaaaaaaaaaaaaaaaaagtagatgaacgtcaatttgtataatttcagtatatatcatatataaaccatgtaaacgacggattacgtcaaagagattgtcacagttgatatcgcatttataagaagcttcttaggtatcaattatcatccaaaaaagaatgtataatcaattatattcttactattatatttctatctaacattgtataacacgttttcatttgtcgattatatgttcgactggtcttttaagcactcatgactcatatgtatataataatatgtagaaacgaacgaatatttaagagtttcagctttataccaattattcgaattggcaactcggagttcatattctctttgttaacctacgaaatacgaatacaacaactaataatattttttacaccgttttcatttctaataattaagaagttcgggctcatttgacctttatctctattttaaaacaactaaatcgtaatattatagtcttaagatactttttagaacaaagtgacgaaaataatgttcacactaacgagattgaacccaaaaaatggctacatgcctacgttaattatgcttttgaattataaaacagtacaaaacaaacacgaaagtatactttatatatgaactaatgaataaaaaggaaacaagatcatgatcatatagtgatttggaatcaaattcgctatataatgtaataaaaatatttatataattaccaatactagtaatgttaggggtctaaaattagaacgagatgtcatcttcttgacagaattattctaaagttgtagaagataagggtgacctggcaccaatcgatccttcattatattggctactcgagcatatctttcgcaataagaataccactaaacgtatatattcttcctattcttatacgtattattgtgtaaattttattaactttctgaaatgaaataatatgcaaagaaatacaatcggttttgagtctgattataaatcacccaattatagcgaaagtcaagttaaaaatttcacatcatgatcattacaacttggggggaaatatttggttcctagctatagctacttctgcttctccgatcttgatacatatatatatgtatgttttagtttttccttgaatatcgattatgcatatgaagatagatttaacatatctattgttccacgttccacccttattcttgtgaaattttctcgaaaaaacttacataacatgtttgatctagcacaattctaatatatatatatatatatatatatatatatatatgactaaagtaatataattaatatatgttcagtgtgaacaaaaagcagagaaaattatgtggtcgtgtacaaaatcaatcaacaaaagtttcgagaaaaatttgatcaaatgttacctacttaccttattgctatgacgcacacgaaccattggattgcaaaagtagcattagttcaccccaaagactaagcgattcgtctagcgaagttaaaagttatagaacatacatatataaaataaatagaactttatggctgaatcaattgggttagctaacgtgaacacatgaatggatcgatgagaataatctttggaaagtgtatctccgaagcctctagaaacaatatattagttatttctattttggttttatgatgttgacgctacaagaacaaatgatgctgacataagatgcatgagaacaattaacatctatataattatgggtgccatttgtattgactatggacgtgagtatttttttttgtgtggaatgggtcatggatatgggtttggagatttatccataccgaaaaacacttacttaacttgttctggtttatttataatgtgatgtgaccgttatgtcactgtgacatttattactacaatatatatttttttttactaagaatgtaaatatttttaaaaaatgatttttttttaagaattacatatatgtatataccctatatcatggccaaaaaaaaagaaataaaaacatagaagcaaattcatatatcttcaagtattatacagtaagaaccctccattttcctaaattcatataatttcaagtatactaagcatatatttataataactataaaatgcacaagtaaatcatgttgtataagttactgtatatttatataaattaatgtcaacttagagtggacctaattaaaacgctaagcaaaaagaggaacaaaatgagaccttgtggttcgtgttgtgtgttgagtgttacgttaaagagaatgagtgtggcttggcatcatctcccacgagggccttcgctcccacttcccataattcttcatgatttctctcttttccaattcatttgttttttgtgtgccacactttttgtccatatatctttccacaattaagttttatagaaataaaataaaaatagaatattgcattattacaaaattattgctagaagcagaatctgatgatgttgaggctagtcgttatcacatttcatatgtaaattaacgaggacaaaagtatttataaagatagatgaataattaaatacgaatataggggaaataaattaccttagagagttgatcaaatctctgatggttaaagagttataaaaatactacagttccatactttgaaaattgacctaggatttcccgctaaaattgaaattaatctcctgtttttttgtttctttatgttaagccctaattttaattagtttgggtgtgagttttagagttgaaaaaggcatccaaacttgtagacctacccattatgcagtatgcaatgcattcttaaactaacctacctcaaaatcaattctaccatatatattttaattttataggtttaaatgtgtaataacggttgaaaatgtattacaaattttacatgaaggtaaaaacgggaaatttataaagtatatcacaaagattttttttttaacaaatatattacaaagttttctatacaagtaaaaataagagagagagaaaaaaaaaaaaaggacagatcgagaagcaatgtaaaatggtctcacacatcaattaattgtctcgactaaaggagagcaaggaccagtaaagtattaatattcacatgacaccacgtgaccgtaacgccttctgttgacatgtctacacagaacaaacataaaaagagaagaataatcaaaacgtaaaatatatattatatatcactgaaattaacaattttataggcaacttttcataatgtcaatatttaatgtatagctgaatcaaacttttttttttttacttccaggaactgcagtgtccttaggattgtttttcatttttttttcatttcgttactactaacagaacttttcatttatatcttgaaattttgttgtataactcaaataaagattgaaactaacatgatgatacttgtaattatctgattatttccttccatgtaaaccgatcaacatctagtcgtaaaacagaaaacaaaaaagacactgatcgacactcatagcataacaaccgatcttagtatacatatgtgtgatatgttacgtcatatttagctcatgcaaactagaatttcttgccgtatttcagttccatatatctcggatatgcatatcaaatttacgacaagaatctaaattttgtgaaatattaccaaagattcctttatatatagaaaagagataaattaaccacacaaacataataaaatggaaaaagaagaagagattcgaaaatgtggacccattttttaaaaattctaacattcaaactgaataaatttcccacgctaattttgatttatttatctccttgcatatcggaataagtataacattcttcaaagaccaaaaaaagaagaaagtataatattctttcaatcaatttccatagaaaagatatggcatttcaattacgtcccaaatatgacgatcgaaatcatcttatataactcaaagtatttaactacatatagtttcgaatcagaaaaatagctttggttttacggattttgagttatgctcttgtgtcaaaatatgataaataaattgttggtagattgatagataagattcttccttttcgaaaattctggaattctgcatttaatatatatatatatatcatataatataatgataatctacttgtcagtctacacacccctttaccaacatatatatatatatatagcacacactctacacggtttccttatcctcatcaaaattaacaaactcatttttgaatacccaaaaaaaaacctagctagctcgaatttttttaaatatataataacatcaacaatgtctggtgtgtgggtattcaacaaaaacggagtcatgaggctggtggagaatccttacaaccaatccgccggagattcgtcggaatcgtcctcttccggtggtaaccagcagcagaggatgaggaggaaaattctcgtccatcttccaagcagcgaggttgtgtcttcgtacggatcacttgagaagatcttgaagaatcttgggtgggagaggtactacagtggagacaataccgatcatctgctccagttccacaagagaacttcgatcgatctcatctctctccctcgtgacttctccaagtttaactctattcacatgtatgatatcgtcgtcaagaaccctaacgtcttccatgtccgtgacatgtagtagtcaatcatccaaaacaatggttcaatatcattctccgatcatcgccgctggtgatatatctatcatgtatatatatatgcaggtttttattttgtcgttgggtgtttttgtttttggtttattttgtttttaatgcatttaatgtacgtgttttccgttcgacgtcgatcgattggggtgggttcaagctagagccattctaataacttttatcattttgtgattttaatgaaattgtatcatgttgtcaagttctcttattatggagtggatcaaaaaatatatacagtacatcaaatttcgaatgttatatgatgaaatatcataatttggtctatgatttgcatttaaataatatgatgcgtggaatttatgtaaataatttaatcaaatatactcatggaatgcaaatatacctaacatgtgaagaaaatttgttctgtcaaaaattactattatatacagcttaattagcaatttaaacaaaaactactatatatacaagggccgatagattatacaaattttcatgaaaataaaaaataaatgtgttgtttttaaaaccccaataattatcacaaataaaaactacagttgcgtttttgtattttttcaaacaacagtctactagacgtaatttttttgataataatacataacttcaattgattgatcatccatcacatatttgagtatcgatgaagtaacatgggagattaataagttagaaactttaaagtcataatcatattatctaatcgtttaagtttttttttttttgaaaccgtctggctaaaaaaacagatatgtatacaaattaaaaccatatagatagatagatatagggtaaagatactggaatacaaatgatcaattttcaagtacgaccaaaatctaaagaaggaaagtcaaaaggtgtccaattagagaagggcccccaaatgtttgggaaagacaacggataaaatgatgggcgcacgtgacattcgctacttttttacccaactttcacacgtgtcgattccctattgctcattttcccactttgtcatagattcatatgatgggcgcacgtgacacataaaatactttttaagacgcaatgtgtgggcacgtgtcgattccccattgcccattacccccacttcgtcacttccttatcgatgtcgaacaaaactttctttttcccaaataaattcgcaccatattcgggacctctttttttttttttttttttgggattttattatatagtttgtatgattttggttttctttttcttttactcgcattatgggtctaagattctggagtgcttgatttctcaagtaatatgcaggtttaatttctgcccaaagattttcagatatccgatagtccaaaatcgtttatattggtttactaagttttctttaaacattcgatattagtaaagagacgtgactaagattttggctatatcaatagaaaatgaaaaagaagttttgggcctataaacgctgactatacacacatgcttctattagagtggttcttattgtaaattggagtatcaaactatgtagattgtgtctgtcgaagctcgcaagggttagaaaaatgattgtctcgtccagataaaagcattttcttacacaagacacgaaaatgtttgcgatcaaaacttcaaatgattaagcattttataatttaatttggataacggatacatttttccaggcaaaggtaacgattatgtttggaaaatctgaatcaagatgacatcatcgtgaacataattacattttaagacggagcagaacaacgagacaaactacgaatacattgaaaaaacatatgcagatcctgctgatttatgacaagaaattaactagtttttataatcacacatggaagtactatgactactacttctacatcatttttatagtaaaagtaggagatcaaattacatgagatggtaatggatcaaagcttaccaagttaacatgcatgaagtgatttatacgtgctattgagtatcagccatactcccgtttaaagtccagtaagctacctagcgttttatgcctcaattttgtgaaagttttatggcgtgatacttctacataatacgatgcaaaagagaattaacaatgtttgtgataaagtgtagctctagccatgaagaaaaactcatgaatggaagcaaagtaaagaagtcctgctaagtaatcgtttttttaggacaagagattcattaccatctcatgtcgccacccacactttgtaattgtagtggatcggatggtataacaactaagaatacgaacctatatataaaacgtatgttttcattagtgtattgttataaaacttatacatagatttgagtattcaattaccacacgaatatgtattgtttagttgcgaacaacgttgcacctttcgtggccacacaagactttccccgatcgcagcttcttctctgcttggcgccaaatactatcacgtatcttaacaaaccaacaaaaaaaaactgcgggatgtagaaagaaacaacaaaaagttttgggtcgatttgctacagaattacatttattgtggtctttttgaagataaagttcttttagttcttgtggttggtagtcaatttatttcattttcggaaattaatatttattttagttttttcgtccaacgtaaacgtatccactctttcgcttcttctttcttctgatcatcctcccgtagctgattcatggagtcaatccactgcaatagtttactaaaccctaatttctccttaaaccagcgtcgtcggaggattaatcacgctgttcttaatcggagagatgctcttttgcgatccctcaacgccgtggagttgcggcggagcaggacgttctcggctgtacggacttctaatttctcagttactgcggcggcgacggatgttggtggtcggaattcgacggatgcatcggtaatgacaacggcgatgagcggggtggagagaggtgtgcgagtagggaaatcgagctccgcgcttgagcagctagatattgagcgaggcgtttgcgttccattccgaaagtattctccggagactgtatgattgctgtttttcctagtatcagtcaatttcaagttttgagctctgttgcaatttgttaattcacttatgagctggttcttctttggatttagttgaatcttatgacttagatggaatcgatttgcatgtatattgttgttgattgtttgaattggaaatatactggtgtttggtaatcaggtgaggagtaaagtgctggaatcaagaggagcagtcgtgtctctagtttcaaggggtgtggagattgtttggactcttgggttgtattggtctaccttaacgtatgattttttggttggaagggatgaggaagttgtcccctttcgtgctaggcagcttaggaacctgttgtgcaatttgggaccttcatttatcaaagctggacaagtatgtggatccatcttttttgttagaaaatggcattaacagggttctcaaagtttcttctttaatatctgttctatgggtggcaggttctcgcaaataggcctgatatcatccgtgaagactacatgaacgagctctgcatactccaagatgatgttcctccattcccaaacgaggtaaaatgtcttgtctttttggggaatttgttgagcaatatatttttcttattatcatttacacatcgcctggtgaagctaagtggtgaaggacttttgtaggttgctttcaatatcatcgaggaagagttaggccaacctcttgagaacatatttagcaagatttcttcacaaacaatagcagctgcaagcttaggacaagtttatcgagctactctacgtgccactggagaggatgttgctatcaaggttcttctaaatgaaaattttattgtggctacagagttcatacaggtttatcaaactgaaactgttttaaagctttggttttgacatttatttttatgcatatacaggtgcagagaccacaaatagagcctataatttaccgggatctctttcttttccgaaccctcgcctccttcttaaatggcttcagtctacagaaactgggttgcaacgcagagctaatagttgatgaatttggagaaaagcttttggaggagcttgactacaccttggtatctcatatgcttctcaatttcactctatgcgttgttctgtattgatagctcaaatgatgtgtcttaagttcttgcctacaggaagccagaaacattgaagactttctggagaacttcaaagatgaccccacagtcaaaattcctggagtatacaagaatctttgtggtccgcgggttctggtaatggagtggattgatggtattcggtgcactgacccacaggtatgactttcaaaaagggggacaactcaaaataaattcccctataccctcctaaaaagtcaaaattaaagtacattctgatactgactcttactaaatgtactcaggccatcaaggatgcagggattgatttaaatggattcttgactgttggcgtaagtgctgctctaaggcagctgttggaatttggattgttccatggagatccacatcctggaaatatctttgcaatgcaagatgggcgtatcgcttatgtggacttcggtaatgttgctgtactgagtcaggtaatttgagtttaatggttccaaggtatctagtatagctagcttatgtcccttcctatagtgattttcacatctatatatagagacttgttattcatagtccaaactaaatctttttttttctcagcaaaacaagcaaattttgattgatgctgttgttcatgcggttaatgaggactatggggagatggcaaatgatttcactaggcttgggttcttggccaaggataccgatgtttctcctatcgttccagctttagaagccatctggcagaactctgcagggaaaggacttgcagatttcaatttccgaagtgttacaggtacttgatatattgcattcctcaagcaagtttgttttgtttactgagcaccccatgcacatttgaagaaacggtgtcacgtttttggtgcaggacaattcaacaagcttgtgtacgactttcccatccgtatcccagagcggttctctcttgttattcgttctctgcttacgcaggagggtatatgtttcacactgaagcctgattttaaatttctagaggtgaagtctcgtttagtattttgattctttcttttcaaagttaggattagctgacatataaatcctgaagtgagcagatactagctatatgttcacttatatttcccttcccacactaaaagtgaacattttatctaggttgcttatccatatgtagcaaaacggctcctaacggatccaaatcctgcacttcgggaacgcttgatacaggttaaattgataattctgatttagtttcataaatgctatgttgaattgttatccgcatcagatgaaatcaaagctcttgttgccaccgcatgtcaggttctattcaaagatggtgttttccaatggaaaaggctagaaaaccttttatcacttgcaaaggaaaacgtcgccaagatgagtagcaatcctaatctacgagtaaagcgtgtgtaagtaaccaagttctatataagcattgctcccaaaatctcactcgttcaccctgtgaagcttgaattctaaatccgtatttgactcatgaaactttcagggagagtaagcttgacttgacagataccattaaggacggagctcgtcttttcctccttgacgaaggcatccgcaggaaacttattcttgcactcacagaggactcgaagcttcatgtagaagaggttcatacatcagacgtcaccagatttatatctatagcacttatcatcgccattgatgactctctaaagcaataaatttacatttgttctttcagcttgtggacgtatacagattggttgaagacgaagtagatattcccacactggccatgcaagtcgtgcaaggtaatagaacggaaaaacccccattttgcttcctttcttttttgtcttctcttcatctatcattcaaataataaagcttttgcatcaatagaagccttatggagagactatcacagatatgcattcctaacataactaagcctgaatcgatagctgaccatcaattctcttatgatccagtaaacataggaatcttggggcattgattgtaaattaacaagtagttttgtatgactgaagaatgtggttccttttgttttgaatgcagatttaccgaatgttttccgagattttgtgttgtcatggagcaactcagtattatccgacagatgatgaatcagcttctcacttactttttttggctctttttgaagaggaaagaggtaatatatattacagggagtagatggagaagaaaagcgtagattaatatatagtttaatcttcgatgcatacatgttattaacttatacaccaatccatacatgtaattatataaaagcacacacaaacttcacttcacttgttacccagtttgagtcttggtctcttggacgttgtctactgtagttggatatctaaacacattaatcgacgtcatcaaatcaaagttgtagtgttctcacaacacaactgattcacaatctggactcgaatgaattgaatcgttttgcgtctcttgggtcttggcctcgccctcgaatactggaaactaaactgaaccaaatgatattgagttatgcaattacacaaaaggtcccctcaattatccagtgtcattttctgctttcttgagctgtttggtttacaaaaatttaggtaggaatcggcataagattaaatcttatttgacagaaaattccattatcgccaaaaatttcaatcaataggcgccaaacatttcaatcaataggcgccaaaattggagaagtaaagggaaaaacacaaacgtaacaaggattcgagctctctctagacgatgcaagccaaaatcaattctttcttcaagccctcctcttcttcttctatcgctgcctcagtaacaacagacacagacgatggtttagctgtctgggagaacaatcggaacgccatcgtcaacacctaccagcgtcgatctgcgattaccgaaaggtaaatcaatgatctttggcggttttacttctctttaggttcttcgaatttcctactttatttgtgttcttcagatgaatagaaaatgagcgataggcaactcctgattttctgggtttcctttaagatatttttgggcgaaattggatttttttttttaattgggtgtctttttgtgtgtctcttaattttgggtattcagaagtgaagtgcttaaaggatgcatcgaaaagacgctgaagaaaggatcttcttctgtacctaaaaatcacaaaaagaagcgtaattatacacaattccacttagagttgggccaatctgattttcttctcagacattgcgcagaatgtggagctaagtatgctcctggagatgaattagatgagaagaaccatcaaagttttcacaaggactatatgtatggactcccttttaaggttaggatcacactgaccttattgctcaagatcatatgtttctttgattattgtagaggttattagataaattgttgggtgtttatatttggtctcagggttggcagaacgagaaagcgtttacatcacctttgttcatcaagaaccgcatcgttatggtatcagaaaatgattcccctgcacacagaaacaaggttcattgttttcacaattcaacttgcactgtttatggtaccgtacttcgtttctaaacgatggatcttttgcaattgcaggtgcaagaggttgtgaaaatgatggaggttgagttgggtgaggattggattcttcaccaacattgtaaggtatgagcctgtatccacgtcttaacaacagtcatttgcggataaattccatagctcatgagtgttgttttggtattttatgtctactatattgagttcatgggtatctgatacaccttgttgagaagcttggcgaatacttgctttactttggtccactataaatagaaaaacttcgacttagtctgattccttccatgtctatgactagcattgaaatcaaacaaaaaagtctatgatatctttagatgacctcatttcaataaattcacaagaaagatgatataacccctaattactttcctcagttgttttagaaactatcttgttatgtgtaggtttatctattcatatcctctcagaggatctctggatgtctagttgctgaaccaattaaggaagcatttaagctcatagcttctcctgatgatgaaagacagttacaaaaagagagctcatcctcgccttcaacctccattcagtttggaaacattgttctacaaagagaggtatcgaaaagatgtcgaacatcagatgatagattagataacggagtcattgtatgtgaagaagaagctaaaccagctgtttgtgggattagagcgatttgggtctcaccttctaatagaagaaaaggcatagccacatggttactcgataccacgaggttaacaactctagcaaactacctaaaacaattgtcatggtgaacaaacattcatacattatggtgacattttgtttgtttgtttgtataaaatcgcagggaaagcttttgcaacaatgggtgcatgctggagaaatctcagttagcattttcacaaccaagctccataggaagatcttttggatctaaatattttggaacttgttcattcttactttacaaagctcagctaattgatactcacttttcttaaacggcataggtttcatcacatcacaaccatcatcttcactgttactcctatttgtctgtcttttacatattagcaagttggtgaaatattgattggctgatcccataacaaacaaaaagagcaacacattcttttatttttatttttctgttttaagccgtgagtgtttctttatctaaagactgaaacaagaaaccaaacatgatccatatgtctagagattttcaagtagaaggtaccaagaaggatcaatgttcagtctcaattctcagtccaaagactaacgtttgaagccgtgggtaccatttaccatccaccaaacataacccaatccaattttttgtcttggttacttcgaacctcaagtctttgtctaatgacctctttaagccgtgtgtaacttgatatttttctaaagactgaaaaaagaaaccgaacatgatccatgtctagagatattcaagccgtgggtaccaagcaagatcaatgttttgtcttacgacttagtctaaagactaaagtttgcagccgtgggtaccatttaccttccaccaaacataacgcaatccaatcttttgtctaagagattggttacttcgaacctcaagtctctgtctaaagatctttttaagccgtgggtaacttgggctttgtctaaagactaaaacaagaaacaaaacataatccatatgtctagagatattcaagccgtgggtaccaagcaggatcaatgttcagtctcacgtctcagtctaaagactaaagtttgaagctgtgggtgccatttaccttccaccaaacataacctaatccaatattttgtctaaaggattagttactttgaacctcaagtctctgtctaaagactgttttaagccgtgggtatcttgagctttgtctaaagactgaaacaagaaacagaacatgatccaaatgtctagaaattttcaaggcgtgggtaccaagcatgatcaatgttcagtctcaattctcagtctaaagacaaaagtttaaagccgtgggtaccatttaccttacaccaaatataacccaatccaatcttttgtctaaaggatgggttacttcgaacctcaagtctctgtctaaagacttttctaagtcgtgggtaacttgatctttgtctaaagactgaaacaagaaactgaacatgatccatatgtcgagagattttcaagccatgtgtaccaagaaggatcaatgttcaatttcaatctaaagactaaagtttaaagccgtgggtaccaatttcctttcaccaaacataaccccatccaatcttttgtgtaaaggattggttacttcgaacctcaagtctctctccaaagacatgttttaagccgtgggtaaatagatctttgtctaaagactgacaaaagaaaccgaacatgatccatatgtttgagattttcaagccgtgggtaccaagaaggatcaatcttcagtctcaagtctcagtctaaagattagagtttgaagccgtgggtacaatttaccttccaccaaacataacccaatccaatcttttgtctaaagaattggttatattgaacctcaagtctctgtgtaaagactttttaagccgtgggtaacttgatttttgtctaaaaacacaagaaaccgaacatgatccatatgtctagatattttcaagccgagggtaccaagaaggatcaatgttcagtctcaagtctcagtctaaagactaagttagaagccgtgggtaccatcttccttccaccaaacataacccaatccaatcttttgtctaaagaattggttacttcgaaccccatgtctctgtctaaagactgttttaagccgtgagtaacttgatcattgtctaaaaagtgaaataagaaaccgaacatgatccatatgtctagatattttcaagccgagggtaccaagcaggatcaatgttctgtctcaagtctcaatctaaagactaaaatttgaagccgtgggtaccatttaccttccaccaaacataacccaatccaatcttttgtctaaagaattggttatattgaacctcaagtctctgtgtaaagacttttttaagccatgggtaacttgatttttgtctaaaaactgagacaagaaaccgaacataatccatatgtctagatattttcaagccgagggtaccaagaaggatcaatgttcagtctcaagtctcagtctaaagactaagttagaagccgtgggtaccatcttccttccaccaaacataacccaatccaatcttttgtctaaagaattggttacttcgaaccccatgtctctgtctaaagactgttttaagccgtgagtaacttgatcattgtctaaaaagtgaaacaagaaaccgaacatgatccatatgtctagatattttcaagccgagggtaccaagaaggatcaatgttcagtctcaagtctcaatctaaagactaaagtttgaagccgtgccattcctttcaccaaacataacccaatccagtattttgtctaaagattggtgttttcgaacctcaagtctctgtctgaagaattttttaagtcgtgggtaacttaatctttgtctaaagattgaaacaagaaaccgaacatgatccatatgtctatagattttaaagccgcgggtaccaaacaagatcaatgttcagacttttatttctaaagccgtgggtaattgtctaaagttcgaatcaaggatcaatgtgtgtttgaagccgtgggtaccctcttttccttgcaccaaacataacccaatccgaattttgtcccttaagtctctgtctaaagactttcttaagccgtctctgtctaaagacttttttaagccgtgggtaacttgagctttgtctaaaaactgaaacaagaaactgaacatgatccatatgtctagagattttaaagccatgggtacaaagaaggatcaatgttcagtctcaagtctaagtctaaagactaaagttttaagccgtgggtaacttgatctttgaccagtaaactgaaaccaattccaagtatatttgtcaaaataataagccgtgggtaaaagatcggttttcagtctcaggtcaaaatccctcataagccaacttgacgggacaatgtccccaagaaagaatctgacagaacactaatagttgagtgtctgcctatgatttctcttgggtttgaaagaaaaacaaaacaatgaagaaatcaaacaaacaaaacagcaaaacaagagcaacaaaaccacaaccgatcgcaacaataaagcggtacaaaaaaaacaaaacgaaaaccaaaacctaacacaaaaaggaagaaagcaacaatctttaattcacagaaactttgaaacgcagagtcgcgattcgtttggttttgcaaaacgaaaagagaaccaaacaaaaacatgataatagcaaaatttagaaaccctagaaatcaagtggattagaagaattcttacagtggttatcgctacaaatcttcttcggccataaatgtttcgatcgacagaaacatgcgaaacagagaaagagttgatgatatttaaatttagaaacactagaaatcaagagaattggaagattacttacaatggatttgtcgctccaaatcgtcttccgtcatgataaagcgatcgagagaaatatgccaaacaaagaatcaagaaggcagaacaaaattctaagaaaattatgacgctttctgataagctttcccgtttttatagacactatctaaaacggtgccagctggctgatttcctttttctataacgccgaatttccttttttttagttaacataactttacttatttctagtttctatttattaaaagtgggccttatgttagcccaatttaaattaatgggctcgttacatcacgcatagttttgcgatcatttttatttagcttttgtttgtttttgtgaattattattactccattagaacaagtcaaatacaagcttagaatttttaattctagataaacaaaaagcttcactcttcttttgtttgtcacaactttattgttatttagatttttaacgagtttaataagaaatggaaaaaaggagttttacttaatatagattgtttgatattattccaagcaaaccaaacaaaacaaaacaaaaacattagaaaaacaataaaaactagtcaaagctttttatgtattttgcaagaagaatttgttgatttatttcctaatttaaatttatatgtacagtaatttgaaaacttactatttgtgaaatactaacctgtagtatatttttgattatgttattttattaaaaaagtcgtcataaaatattttagattaatgaaagaaaccttccattaattaatatattaaggatattaaaatagctgctaatagtttaattagtgtattgaaaaggtaaaaatggttatggggattgagagaaaaaagctaccaactgcgaaacactatccccacaagcaaaccccatcatctcccttcttcttcttcttcttccacttccctttgtaactttcaatctcaggtcagcttcttcgatttccttctttatttctccatgtttttcatctgcttactgatttccaattcagtgatttggatccgtcgtttctaatttcgctagggttcttctgctctcatatgtttttatatcgcgatcagttttctaaaatcctttgattttgaatccgattctcactctctcttggtttcttcgtgtttcactagcaactgaatcgttttcatcgaattggttttagaggttttatcttttgcattcttatttgcagatttgagattgtgaaaaaaatacttattagtctccttttacattcatatattcagctaatatcaagtaacgtggaaaggatttgttccgtcaaaggttggtgattatacagagactgagttcctgataagttggattgagcttgttttcatttgcggatctttgagaaaaaagtttgcaactttatggctctggaacaacaacatgtttgtgaaaagcggcttcaagccaagaccttttctacccaagagtttcagttgactctcaattgggatgatttaacttgtcccatttgtttggatttccctcacaatggtgtgcttctccagtgttcttcttacggaaacggttgccgtgcttttgtctgcaatactgatcaccttcactctaactgtttggatcgtttcattagcgcctgtggtactgaatcacctcctgctcctgatgagcctcgctctaaggttttagaagagagttgcaaacctgtgtgtccactgtgtagaggagaagttactggctggcttgttgtagaagaagctcgtcttcgtcttgatgagaaaaaacgttgctgtgaggaagaacgatgcaggtttatgggtacttacttggagcttcgcaaacatgctcagtcagagcatccggattctcgtccttcagaaattgatccagcacggaagcttgactgggagaatttccagcagtcgtctgaaataatcgacgtgttgagcacaattcactcagaagttccaagaggagtggttttaggggactatgtgatcgaatatggagatgatgacacaggagatgaatttgaggatgttcccaacaatgaaggaaactggtggacatcttgtattctctatcaaatgtttgacaatataaggaatgccaggaatcgaagaagatcaagaatgagtgagagtaggagagggagtcgccgctctagctatgagaattccaactctgatgacagctcagtagcatccatagagtttccggagtatagagtagatgagatcgatgacgagttcatcagcacaagtggagctaacagaagtagctctatgcaccaaaggtcagaataatctatagctttacaccactaattttgtattgttgctgtctgcagagatatacattcttactttcatagtttataattattctgcattgatattaaaggcttaccagtgagcctggtttttaggcacctcttgaatgacaaattagctaatcaggccccattgtgtgatatttctggcataatagcttggggtgttgacctggtttagtagctttcttgtgctatatatgatggttacttaagagacattgcttgatgccttgttttctctgatttacagttcaagaaggcgtcgaacccgcttctatgaaaattaggtattaaccttctgtttctatgcttttggtactgtcttcttgtgaatctgtaatgttccttttcgttctttctcagtcagctggaaaatgaagcgaagcaaatgatgcagaccagcctatttgtagccagtgttcttggttttggacctctttcttctttttctttttgtttctacacataaattttattttaggtttgtcttgtgacattactcgcagcagtcgcagcctttgtacaaaaactaaacaaaaagcctttttgggatattgtagtacccttttgtcgttgtctcttctttgttttacatgcatctctggacaatgtagatattgagagtaaatcagaagtcaacgttcgtgtattaatttttaacatttctatttcagtgaacatactctttttaaagcttactcttattaccaagtagcaacacaacttggtcaaagactcaaaagtacatgaaatcatcatacaatccaacacttgagaacaagtggcacatacacagaaactaatatgggacgttattgggcaagtttcttatgacattactcttcactccgatcttggtacgcattgtctcgcctctcttgctcatctccttgcgcactttcatcctcaaagtctcctctttcgacggtactgtcttcagacccaggctcttgtacctgagaatttaccatttgttggaataaccttagtttaccttgccgattatctgattggatagactcggatgattaacgggtttggagaaaacaaaccttgaagataaagaggcaattatctggttgctgtcttgagaagttgggcgtggcttctgtctgtagtaacgcatgaattcacgggacccgagagttttagacgttgttgtgttctcggacttctccgtgatcaagagctcagaaccaccaacgagttctacagtattgtctgtttcaccagatacaacaatttgctttccagcttcatcaacatagctgctcaattcatatattccaaagaaaggtgcggattaagatttggcatagaacgaggaatacaggcgagaacaagaataatcagagatagaagagagttgaaacctgctgctgtagtcataaaactcttctagctcagcatcttcttcatcatcaccatcaccataatgcagtttgcaatgactctttgcttccatatgttttcttacagcttctaagctgctgaatggacggcacagctcattgcagtacagacacatgaagtctctcttgacctaaatgatgagcaatgtataagtaaacaggagtaagaatttcaaagcttgacaacaacgaacactgaatggtaaattgatgagtccaaaccttaagaccaaggtaagtgagaagcccttcaggatccttgagatactcaatatcgggaataaagaaaccatgatgcttatgcatgtgaagcatacagctctctaaggtcttatgttttttgtcacacatcaaacagcaggttggatccagctcatacttatctgcatcaccatcatcatccatatcttcagcagatccagactcattcacattcaacttagacaaagaatcagaggcttcttcagcagccaattcctcgtcagaatcaacctccacccattcatcttcactatcatcatcaatggaacccctgtgttgaacacggcgaggaagttgcctgataatcgctatatcctcctctccgttgattgatgtcccttgtgaaacccgcaaaacatggctacgcgactgaagatgctgctcatgagccttggaactcctgtaacctttagcacagattgcacaagtataaagcataggtgcttcatttgatttattcttctcctgagcaagagcagattgtctagcctcaaacaaggcttctgtaactccaggaactccagccacctaacataaaaaattacagaaatacaaagattcaaatgcctagaagtaaccaaatctatgattattgaaatccttgttccttagtagaataagcttcaaaacaaattttcatataaactctacgattccataaccttaactaaacaatttcgatagcaaaatggaaaagctgtttctcagaaactttcatctcatcaccgacgcaagattttcccgagaaacagataggcttgagttcaaattcgatagagaaagcagaagaaatgaaaccttgcgcttgagattgtagcggtgccaatcggatttgtaatgaaggttacgttcttcttcgtccttgaactccatgttacacgcgttacatgttaaaccaggcatcttctctccttcaatatcgatcgattctagaaatggaaactggagaagaaaagaaaatcagagaaaagatagttgggaggataagatttgttgttgatatgtgtagagcaacgacggctcgtaaatggatcggcgatcgtgtttgtctctaaaaaagcgtcgattgatgatgattgattgccatcaaaatgaaaaggaaggcgccccgcccattttagatccgatcgggttggaactgacccgttcctgacccgatacaagagtagcccatttggcccattcttttagcctttttgtaacactgacacagttgacgaattaagtattactgtatgagtaaccaaaaaacatttttctaatattgtttttaaaataactacttacaacttgattaattacttcgtttaatcatgtaacttttttttcttccaaattctaatctctctattaaattactgcatttataagatctaaacatcatgtgatatgttcaaaatatgaaaagagaagaatataatacatgattttactacgattaattttttttaatcgcaatgttttgtttttgcctaattttattagtggaagaaattttaaccgcaggcctgtaatttaggaaactaactattcacccccaattaaaaaaaaaaacaagaagacgacaaataacgagaaattaccaatttttcctcaacactttcattatttcctacaacgaacttctccctcctcctctcactttcaccatggattccgtctccggttacgccgccggagcaggtcagcctcgagtcggtgggaaaattgttcgaccacgacgcaccgctgttgtcaggacgccgtgtgagcgccccgttcagagatcccgagatcctcctcagcaaaaccctagttggatctccaggctcgtttacaaacccgccagcgtaattgcttccggcgccggaaaattcatttcttccgtcgtcttctccgactcttcctcatcttcggaggaggacgaggattcatcttcaggtttgtaccatttatttcagtttagataggattaatttgaatttttggtttattgtctggtcgaatctgaaagctaccgtttcgtttgaaatgtgaagtttgacttaaagctttcccattttctctttcctttaatatgtgggacttaagagcagttaagcattgttgtactctatttagttaggttacttctaagctataaacttcatactaattctaaagctctaatttttattcatataatgtagttctgggattgagaataccaaccagctttgttgtgtcttattcttttaatgtatggatttttatatgttttcttctttgtttgcagatattgatggtgatgaggatgttgagaagaacaatcccgattttactgaagaggtactaaccaccttgttcgttttggtgattgctatgccactgtagtcctatgataattgtttgaagtaaagttcgtgaagctaacacgttttcaactgagagttttttttataaaagcataatttcagtttttgtgcttgtgtgaataggaccttctgagtgcccagcaaccaagcattcaacgactcagttctaagcgtgtaattgagcagcttctcttgcaagaaacatttgcaaggtatttctctgcctggctttttggacatcataagtagcagcctcctcgactattcttattatttacacctcatagcttaaagaatctttctgagacgtgtgtagttaccaaatctaagctgatcttgtatcctgcttattcattcatgtgtatgttgtttcagggaagagggtgataggttaatagatatcatcaaggctagggttgtagatcatcccagcgtcccctctgctattgagacgagtcatgatgactatggattgacaagcggtatgttactgatggtagactgtgcaagtagaccggattagtctatgtgataacgtcttcttttctattttatttctagacgtgaatgtgggtgaaatgtccaatacagctgtcatggaagcaagaaaatggttggaggagaagaaatcaggatcaagttcaaagtataaagtaagttctggaaacttgcttcttaactgttctaattgctgcagcctgcaggtatcaacttttttgtgatatcttgtctccgtgctctaagccattattattatagaaggagacatcttctgtttgggtaaaatgatttgattgttatatgccaatccatgtgatcagcaacttaaagctctcttgcaaaagtaggttgttcagaattctgcgtgtggccatctggtgacgttaattctgaaatgtcctgattgggaaatacctttttgtccgcttaaaatgcaaaagatccatattgttgctcttcttttgactatgaagaccatttacttacatgattttggtcaacttctgatagcttcgcttcacagtattctttttccattgtactttaaatgatgatcaccatctcagccattagtttaaatctccaggcaactgaagatggtgctggatcgcctgtggacgtggccaagtcttatatgcgagctcgtctgccatggggatctccagctgcgaataatttagattttcgatcaccatcatcagcaagagtgcaagggacaccccttccttatagcgctggaaacttttcctcatccaaggttagaattttaagttctccagcagtgcatacttttcttttggtcaaatgttgtttgaaagtctgaagtcgtttcatcttggtttatgagataaaattctctgcttaacttctattgtttatgttagataaccacgaggaatttgtgggacactatttccagctattcctaaagaaaagttgcataccgttatatgtattttcaatggctctctcaaatttacccttattcattctgacattggttaccaaatgcagctgaaaaggaagtccggttctaatcagtcatggaatattcaagatgaaattcgcaaagtcagagctaaagcaaccgaggaaatgcttaaaagtcccagtagtgtagcctctttggaacctaaatacagcccctatgttttagcgactgatatgctcaaaggaaatgcttcgtctttgaatgctgatggaggtgttttttttctttctttattcacacgtggaagaagtttttcagtaagacatgagttgaaactgaaattaactcttcttttctgttctttcagctgtacggaatgaacaaagcagagctctaccaaattcagccatacctacctctgagcacaatcaggtatcaagcactctttacactatgtgtctctcattaccaagaaaaaacttgcagttccaatctttcttgttttggtgtccttgtgtgttttacttgagtgaagactacggaagctaatcaagccgtcaaagaaacaggagttttacacactagatctcgttagtttctcccttaatccttaatttgtatacactctctcatcttcgctttttatactctgtctcatggatttaatgtgttctgattaggtggagttggtttggaggagacatttatctccacacaaggagtcaagccatctgaagatacgaataccgctcctcaaaggttctttttattgtgcttatccttccaacacagattgtaccttgtttctttttgacagatatgttttttagtatatcaatcttctgaagtttttcaactgtatgcgacagtggaactgctgtagatgacttcaatgatcaagatggcgattttatccaacctacttctactatcggaaacaccacaaatggtatacattggatgttgaattcctttggttctgatttttagttgggttctcttaatttacttgcgctcctattgatgcagctgtcttggctcttggggcaactttggatcctactgggaactcttgcatccctaaagatgtgtttgaaacatcaaaagaagctgatgaaataggcgcatcacgtcatacttctaacggtttcccatcttcatcacctaggtgaaaagcaactcctttgtctggctagtttgacatgatgacattatttcctcctaagcaaagccttactttttcagttcaccagcggttatggaaggtcaaccaaaacccacaccaccagaagaaaccaaggcttctcagcctatagctgaaattcatggtgatgatatgacagtagggaatggctcagatggtgcaattaataacgaaagcaatgacagccactcaagtgcctctaacagttcaagcacccatgaagaagagtggctcccaggagaccagtctctacctaactcaaactcagcaagtagcagcccgggaaataccaaggtcttggcatacagcagaagaggaagaggccgaggtagaggaagaggcagaggaggtcgaggcaaaggacgggccaaataaactttgtaagatgagctgtacacaacaaacacaatgcagtaggagagtattatgatgaggtaggattatgtgacatctcttttagatttgaatcccactctgtttgtgtttggtctttggtcacttcgttatctttttaggttatcttgtagtatttgagttaggaggatttgtcttgtcgagttatgtggaattgtgtctctgttgtttctttcatttgtctgaaatctctaatgtttaatgttgtaagtttgaagcttggtttcgttccagctgacgaagctttgtagtttgcagtttccatatgttgaaactctttttcttttgttcgatgccaaatttttaaatcttttttacttgaccaaaaagccaacacctaatttttttgggggaaatctcaagtactaacaccactcatcttttaacctcgtaaagtgtcaagtaaacaaattctgacatgatccaatattagatgagatcactcagatcaaaacattgtaagatgaatataatcaaatgggttcaatctagtgttacacaatctcttaccaaagtacaaaagcaataacgagcgaaaagaagaaacccaataaccaattttatcaagacagacagaaagagagagagaaaaaacaaaacagacagaaacaaaagtgaagaaaaacgaacaacaaaaacccaataagcagcgatcgaagctaaaataaacacagaagagcgaaagcgctcagacattcaaatctgaaaagccatacgaaagaagaagccacgaagattcaatcgaagcagaagtgtattattaagaagccgagaaatcattgggttggtgtcggaactcggaagttacttgttttgttccgatttttcttttgtctgaattctttctggtcaaatcttccaacacttgttcttctgcttacaagcttgggtcccgcttctcattgcccgcttcctccttcttcaattcgaatttcatcattctttaggcaattcgaatctgttgctctgttctcaaagctccaatcatttgttcaactcaactgatctcgatttgctccaactcaaatttcgg

SEQ ID NO: 652 - DNA, 94319 bp, Arabidopsis thaliana
gaattcagcgattgagactgggagagccaagaagggaaagaaggaagaggaagttgaagagccagaggaagccgttgaggaggaggttgagaaggaagagccagaggttgaggaccctacgagaaccaagattgttatagaacactggtaatttttgcgtaaatgttttcgatttctttagagataatgtttggaatcataagagcaaaaatttaggtttttttctttgaaattgaatctaaaagcctacaactttggggtatgtgttgagacttgtgtgtccgtgtgtagcagctaaggtttatttgctagggtggaacaatgtgttaggttttcatcttgattctgcataagtttttggtttgagtgattagtggtttatgttttgctcgcatttgtgaagaggacttgactatctgctttctgtttgtgttcttgtcttgctttagctgaattgcaatgcgtaatggacgtgttcattctataaatggaatttgcttctatacttatgtctcacaagagttcttttttgttttgttttgtgatgttattgaagtaaacaatgcaatgctttcaagacaagagctattcaggtgaaggaagctttggagggagctgttcctggcgtcacggtgtctcttaatcctgaaaaggtaatgcttttactgcagatgaatatatcgtcatgaatgctccgttttgactaatgcgttagagcatacttttcacattatacttgataagattttcttctaaattactaattctttcttttgatgtgcttgaacagccaaggcggggttgctttgagatccgggaggaaggtggccaaacattcatcagtcttttggtaaaaactttcattctaataaaaacaaatctcaatttgtctcgcttctgcatatgatttgttcagtttgagtaaggtttattgttattactaattctcataacaccacttgctctatatgcatatgagaatgaaaatcaacttgatccttattcattacgagaaatgtgttattgtgagtagaaatcatgaatatgtttttgcctttcaatcttaacatagacctaaagatgtagattatgtttatctcattttgtaggagatgaaacgtccatttgcaccaatgaaggcacttgatatggaagaagtcatcgaggacatcataaagaaagtcaaatgaatctgttctttgtttctgcctcggtctcagtttaatcaattaggtttctgcagaagactttctagagtaatgtcagatttgttaggttcacttttattgtttcggtatgagcactgtaagtgcagtctcgtcgtttggcaatgcatgattagttgatagagaaggatctctgtagtttttggggttaactcgtatttgtaaggctagtttattattcatctcgttgcttgaagcaaaccgatgcataagtgttttttgttgttgggaccatgcatggttctaacaatctatgcactggttaaagcatgttctaacacaattagaactgtgttacaaaatcaataggacaaacatcacatttgcattcaaaatggctgataaatacaatgcatgatgagtagaaagctcattacatttaggtttctttcacttccaatggccgtgtctctcttcttggctaaaagctacagaaaaattgttttgaatctcacctaccattattgtctttaacccacatcacccgaatcttagaacccagcaaagctagccaaaaatgctaacaagagaataacatcaaagctccaaccagccttagaagcagaagaagatggtttagccttatcagcagcttcaatcttctcattatcggcgcttggagcaggagctggagaatcagcctctggtgtgtctgttgcaggtgcaggtggagtttttgggacagcagaatctggggaattgtcatcagcagctggtcctggagctggaaccactgaagcatccatgggagttggatatggagctacatgaacgtatggtggtggaggtgggaaaattgcaaggctgagtccaggagccactattggcatggtaatctggatgatagagaggttatatggattgtggtacaccgtcgagacatactcagcgtttaaaggagagttcttcacttccgatccaaagtaaactcttccttttgatttggaaacgttcaagaaaccattcatctgttcacccaacccggtggtttggtataaggtagtaagcattatactcttctccctcatcccctgaagcttaagctcatcgtagtagtcaagaataacatgagtcatgaggatgttcctgagctcaacttcggatctgttagtgatggagctgatagcgtcattgctaacagcaagcacggttatcgtctggtatttgtcgatggctgcaatgagcttggtcttgatgaagaggtccctcatggtgctgaatttggagtatttctgaaaggccagcgtgatgttattcgccgtaacgaccttagagaagacgagtaagatggtgagggagaggagagaaagggaggctttgagacccatctcgtgtcgtgtgttctctttgctaaacctcaagggcgaagagtgggtttaaaaggagagattttctctgtttttggtattaaatctgaattagtcttttggtgagctaagtctactctgctatttttagagtatagtaagacttggccattgagaatttaattatttgatggctaaattgcgttttaacaagtttttttatgttaattgaaaaagttttcttctgtgcgaaaggaactaaaattataatgatggaacttgcatgtttattagatgaatttatcattgtaacaaaattatagttgttttgtttacaatctgatgaagttttagttaatgatttctaaagttgatggaaaagataacctaaaagactcttaacatgaataattaaacactagtaatttttatttttgctaaaaaaattactactcatctacttattaatatcatcaattttttgtatgataattggcacatcgatatttagtttttggaaaccagagtaaatataaataagaaatgataaattatgattagaaaaagataagtattctgagaaagctaaaatacttttgaataagagtaacaaagaaatttagaatttagaatagaaactgtctatagccccgtgaaaatgacaagtaataactaaacgtcaattgcatgctatgttcacattatatttcgttttcgaaaaatttaattaatgaattacgtcaaagaggttttcacagttaatgccgcatgttcattaatttctaaactaaatatcatcatttgatggaaaagctagcttaacgactttgagtgtggatggtaaaacatatatttttattttttttgctacaacttaaaagcatcaatttattatgatattttggacatcgatattcatgtttgtaaataatttgcctcagaactatagagcaaaatataaattagttggagtttgcaaataatgataaatgttcttaaaaaggtaaataaaattaaagagtgaatcacaaaaaaaaaaaaaaaaaaaaagtagatgaacgtcaatttgtataatttcagtatatatcatatataaaccatgtaaacgacggattacgtcaaagagattgtcacagttgatatcgcatttataagaagcttcttaggtatcaattatcatccaaaaaagaatgtataatcaattatattcttactattatatttctatctaacattgtataacacgttttcatttgtcgattatatgttcgactggtcttttaagcactcatgactcatatgtatataataatatgtagaaacgaacgaatatttaagagtttcagctttataccaattattcgaattggcaactcggagttcatattctctttgttaacctacgaaatacgaatacaacaactaataatattttttacaccgttttcatttctaataattaagaagttcgggctcatttgacctttatctctattttaaaacaactaaatcgtaatattatagtcttaagatactttttagaacaaagtgacgaaaataatgttcacactaacgagattgaacccaaaaaatggctacatgcctacgttaattatgcttttgaattataaaacagtacaaaacaaacacgaaagtatactttatatatgaactaatgaataaaaaggaaacaagatcatgatcatatagtgatttggaatcaaattcgctatataatgtaataaaaatatttatataattaccaatactagtaatgttaggggtctaaaattagaacgagatgtcatcttcttgacagaattattctaaagttgtagaagataagggtgacctggcaccaatcgatccttcattatattggctactcgagcatatctttcgcaataagaataccactaaacgtatatattcttcctattcttatacgtattattgtgtaaattttattaactttctgaaatgaaataatatgcaaagaaatacaatcggttttgagtctgattataaatcacccaattatagcgaaagtcaagttaaaaatttcacatcatgatcattacaacttggggggaaatatttggttcctagctatagctacttctgcttctccgatcttgatacatatatatatgtatgttttagtttttccttgaatatcgattatgcatatgaagatagatttaacatatctattgttccacgttccacccttattcttgtgaaattttctcgaaaaaacttacataacatgtttgatctagcacaattctaatatatatatatatatatatatatatatatatatgactaaagtaatataattaatatatgttcagtgtgaacaaaaagcagagaaaattatgtggtcgtgtacaaaatcaatcaacaaaagtttcgagaaaaatttgatcaaatgttacctacttaccttattgctatgacgcacacgaaccattggattgcaaaagtagcattagttcaccccaaagactaagcgattcgtctagcgaagttaaaagttatagaacatacatatataaaataaatagaactttatggctgaatcaattgggttagctaacgtgaacacatgaatggatcgatgagaataatctttggaaagtgtatctccgaagcctctagaaacaatatattagttatttctattttggttttatgatgttgacgctacaagaacaaatgatgctgacataagatgcatgagaacaattaacatctatataattatgggtgccatttgtattgactatggacgtgagtatttttttttgtgtggaatgggtcatggatatgggtttggagatttatccataccgaaaaacacttacttaacttgttctggtttatttataatgtgatgtgaccgttatgtcactgtgacatttattactacaatatatatttttttttactaagaatgtaaatatttttaaaaaatgatttttttttaagaattacatatatgtatataccctatatcatggccaaaaaaaaagaaataaaaacatagaagcaaattcatatatcttcaagtattatacagtaagaaccctccattttcctaaattcatataatttcaagtatactaagcatatatttataataactataaaatgcacaagtaaatcatgttgtataagttactgtatatttatataaattaatgtcaacttagagtggacctaattaaaacgctaagcaaaaagaggaacaaaatgagaccttgtggttcgtgttgtgtgttgagtgttacgttaaagagaatgagtgtggcttggcatcatctcccacgagggccttcgctcccacttcccataattcttcatgatttctctcttttccaattcatttgttttttgtgtgccacactttttgtccatatatctttccacaattaagttttatagaaataaaataaaaatagaatattgcattattacaaaattattgctagaagcagaatctgatgatgttgaggctagtcgttatcacatttcatatgtaaattaacgaggacaaaagtatttataaagatagatgaataattaaatacgaatataggggaaataaattaccttagagagttgatcaaatctctgatggttaaagagttataaaaatactacagttccatactttgaaaattgacctaggatttcccgctaaaattgaaattaatctcctgtttttttgtttctttatgttaagccctaattttaattagtttgggtgtgagttttagagttgaaaaaggcatccaaacttgtagacctacccattatgcagtatgcaatgcattcttaaactaacctacctcaaaatcaattctaccatatatattttaattttataggtttaaatgtgtaataacggttgaaaatgtattacaaattttacatgaaggtaaaaacgggaaatttataaagtatatcacaaagatttttttttaacaaatatattacaaagttttctatacaagtaaaaataagagagagagaaaaaaaaaaaaaggacagatcgagaagcaatgtaaaatggtctcacacatcaattaattgtctcgactaaaggagagcaaggaccagtaaagtattaatattcacatgacaccacgtgaccgtaacgccttctgttgacatgtctacacagaacaaacataaaaagagaagaataatcaaaacgtaaaatatatattatatatcactgaaattaacaattttataggcaacttttcataatgtcaatatttaatgtatagctgaatcaaacttttttttttttacttccaggaactgcagtgtccttaggattgtttttcatttttttttcatttcgttactactaacagaacttttcatttatatcttgaaattttgttgtataactcaaataaagattgaaactaacatgatgatacttgtaattatctgattatttccttccatgtaaaccgatcaacatctagtcgtaaaacagaaaacaaaaaagacactgatcgacactcatagcataacaaccgatcttagtatacatatgtgtgatatgttacgtcatatttagctcatgcaaactagaatttcttgccgtatttcagttccatatatctcggatatgcatatcaaatttacgacaagaatctaaattttgtgaaatattaccaaagattcctttatatatagaaaagagataaattaaccacacaaacataataaaatggaaaaagaagaagagattcgaaaatgtggacccattttttaaaaattctaacattcaaactgaataaatttcccacgctaattttgatttatttatctccttgcatatcggaataagtataacattcttcaaagaccaaaaaaagaagaaagtataatattctttcaatcaatttccatagaaaagatatggcatttcaattacgtcccaaatatgacgatcgaaatcatcttatataactcaaagtatttaactacatatagtttcgaatcagaaaaatagctttggttttacggattttgagttatgctcttgtgtcaaaatatgataaataaattgttggtagattgatagataagattcttccttttcgaaaattctggaattctgcatttaatatatatatatatatcatataatataatgataatctacttgtcagtctacacacccctttaccaacatatatatatatatatagcacacactctacacggtttccttatcctcatcaaaattaacaaactcatttttgaatacccaaaaaaaaacctagctagctcgaatttttttaaatatataataacatcaacaatgtctggtgtgtgggtattcaacaaaaacggagtcatgaggctggtggagaatccttacaaccaatccgccggagattcgtcggaatcgtcctcttccggtggtaaccagcagcagaggatgaggaggaaaattctcgtccatcttccaagcagcgaggttgtgtcttcgtacggatcacttgagaagatcttgaagaatcttgggtgggagaggtactacagtggagacaataccgatcatctgctccagttccacaagagaacttcgatcgatctcatctctctccctcgtgacttctccaagtttaactctattcacatgtatgatatcgtcgtcaagaaccctaacgtcttccatgtccgtgacatgtagtagtcaatcatccaaaacaatggttcaatatcattctccgatcatcgccgctggtgatatatctatcatgtatatatatatgcaggtttttattttgtcgttgggtgtttttgtttttggtttattttgtttttaatgcatttaatgtacgtgttttccgttcgacgtcgatcgattggggtgggttcaagctagagccattctaataacttttatcattttgtgattttaatgaaattgtatcatgttgtcaagttctcttattatggagtggatcaaaaaatatatacagtacatcaaatttcgaatgttatatgatgaaatatcataatttggtctatgatttgcatttaaataatatgatgcgtggaatttatgtaaataatttaatcaaatatactcatggaatgcaaatatacctaacatgtgaagaaaatttgttctgtcaaaaattactattatatacagcttaattagcaatttaaacaaaaactactatatatacaagggccgatagattatacaaattttcatgaaaataaaaaataaatgtgttgtttttaaaaccccaataattatcacaaataaaaactacagttgcgtttttgtattttttcaaacaacagtctactagacgtaatttttttgataataatacataacttcaattgattgatcatccatcacatatttgagtatcgatgaagtaacatgggagattaataagttagaaactttaaagtcataatcatattatctaatcgtttaagtttttttttttttgaaaccgtctggctaaaaaaacagatatgtatacaaattaaaaccatatagatagatagatatagggtaaagatactggaatacaaatgatcaattttcaagtacgaccaaaatctaaagaaggaaagtcaaaaggtgtccaattagagaagggcccccaaatgtttgggaaagacaacggataaaatgatgggcgcacgtgacattcgctacttttttacccaactttcacacgtgtcgattccctattgctcattttcccactttgtcatagattcatatgatgggcgcacgtgacacataaaatactttttaagacgcaatgtgtgggcacgtgtcgattccccattgcccattacccccacttcgtcacttccttatcgatgtcgaacaaaactttctttttcccaaataaattcgcaccatattcgggacctctttttttttttttttttttgggattttattatatagtttgtatgattttggttttctttttcttttactcgcattatgggtctaagattctggagtgcttgatttctcaagtaatatgcaggtttaatttctgcccaaagattttcagatatccgatagtccaaaatcgtttatattggtttactaagttttctttaaacattcgatattagtaaagagacgtgactaagattttggctatatcaatagaaaatgaaaaagaagttttgggcctataaacgctgactatacacacatgcttctattagagtggttcttattgtaaattggagtatcaaactatgtagattgtgtctgtcgaagctcgcaagggttagaaaaatgattgtctcgtccagataaaagcattttcttacacaagacacgaaaatgtttgcgatcaaaacttcaaatgattaagcattttataatttaatttggataacggatacatttttccaggcaaaggtaacgattatgtttggaaaatctgaatcaagatgacatcatcgtgaacataattacattttaagacggagcagaacaacgagacaaactacgaatacattgaaaaaacatatgcagatcctgctgatttatgacaagaaattaactagtttttataatcacacatggaagtactatgactactacttctacatcatttttatagtaaaagtaggagatcaaattacatgagatggtaatggatcaaagcttaccaagttaacatgcatgaagtgatttatacgtgctattgagtatcagccatactcccgtttaaagtccagtaagctacctagcgttttatgcctcaattttgtgaaagttttatggcgtgatacttctacataatacgatgcaaaagagaattaacaatgtttgtgataaagtgtagctctagccatgaagaaaaactcatgaatggaagcaaagtaaagaagtcctgctaagtaatcgtttttttaggacaagagattcattaccatctcatgtcgccacccacactttgtaattgtagtggatcggatggtataacaactaagaatacgaacctatatataaaacgtatgttttcattagtgtattgttataaaacttatacatagatttgagtattcaattaccacacgaatatgtattgtttagttgcgaacaacgttgcacctttcgtggccacacaagactttccccgatcgcagcttcttctctgcttggcgccaaatactatcacgtatcttaacaaaccaacaaaaaaaaactgcgggatgtagaaagaaacaacaaaaagttttgggtcgatttgctacagaattacatttattgtggtctttttgaagataaagttcttttagttcttgtggttggtagtcaatttatttcattttcggaaattaatatttattttagttttttcgtccaacgtaaacgtatccactctttcgcttcttctttcttctgatcatcctcccgtagctgattcatggagtcaatccactgcaatagtttactaaaccctaatttctccttaaaccagcgtcgtcggaggattaatcacgctgttcttaatcggagagatgctcttttgcgatccctcaacgccgtggagttgcggcggagcaggacgttctcggctgtacggacttctaatttctcagttactgcggcggcgacggatgttggtggtcggaattcgacggatgcatcggtaatgacaacggcgatgagcggggtggagagaggtgtgcgagtagggaaatcgagctccgcgcttgagcagctagatattgagcgaggcgtttgcgttccattccgaaagtattctccggagactgtatgattgctgtttttcctagtatcagtcaatttcaagttttgagctctgttgcaatttgttaattcacttatgagctggttcttctttggatttagttgaatcttatgacttagatggaatcgatttgcatgtatattgttgttgattgtttgaattggaaatatactggtgtttggtaatcaggtgaggagtaaagtgctggaatcaagaggagcagtcgtgtctctagtttcaaggggtgtggagattgtttggactcttgggttgtattggtctaccttaacgtatgattttttggttggaagggatgaggaagttgtcccctttcgtgctaggcagcttaggaacctgttgtgcaatttgggaccttcatttatcaaagctggacaagtatgtggatccatcttttttgttagaaaatggcattaacagggttctcaaagtttcttctttaatatctgttctatgggtggcaggttctcgcaaataggcctgatatcatccgtgaagactacatgaacgagctctgcatactccaagatgatgttcctccattcccaaacgaggtaaaatgtcttgtctttttggggaatttgttgagcaatatatttttcttattatcatttacacatcgcctggtgaagctaagtggtgaaggacttttgtaggttgctttcaatatcatcgaggaagagttaggccaacctcttgagaacatatttagcaagatttcttcacaaacaatagcagctgcaagcttaggacaagtttatcgagctactctacgtgccactggagaggatgttgctatcaaggttcttctaaatgaaaattttattgtggctacagagttcatacaggtttatcaaactgaaactgttttaaagctttggttttgacatttatttttatgcatatacaggtgcagagaccacaaatagagcctataatttaccgggatctctttcttttccgaaccctcgcctccttcttaaatggcttcagtctacagaaactgggttgcaacgcagagctaatagttgatgaatttggagaaaagcttttggaggagcttgactacaccttggtatctcatatgcttctcaatttcactctatgcgttgttctgtattgatagctcaaatgatgtgtcttaagttcttgcctacaggaagccagaaacattgaagactttctggagaacttcaaagatgaccccacagtcaaaattcctggagtatacaagaatctttgtggtccgcgggttctggtaatggagtggattgatggtattcggtgcactgacccacaggtatgactttcaaaaagggggacaactcaaaataaattcccctataccctcctaaaaagtcaaaattaaagtacattctgatactgactcttactaaatgtactcaggccatcaaggatgcagggattgatttaaatggattcttgactgttggcgtaagtgctgctctaaggcagctgttggaatttggattgttccatggagatccacatcctggaaatatctttgcaatgcaagatgggcgtatcgcttatgtggacttcggtaatgttgctgtactgagtcaggtaatttgagtttaatggttccaaggtatctagtatagctagcttatgtcccttcctatagtgattttcacatctatatatagagacttgttattcatagtccaaactaaatctttttttttctcagcaaaacaagcaaattttgattgatgctgttgttcatgcggttaatgaggactatggggagatggcaaatgatttcactaggcttgggttcttggccaaggataccgatgtttctcctatcgttccagctttagaagccatctggcagaactctgcagggaaaggacttgcagatttcaatttccgaagtgttacaggtacttgatatattgcattcctcaagcaagtttgttttgtttactgagcaccccatgcacatttgaagaaacggtgtcacgtttttggtgcaggacaattcaacaagcttgtgtacgactttcccatccgtatcccagagcggttctctcttgttattcgttctctgcttacgcaggagggtatatgtttcacactgaagcctgattttaaatttctagaggtgaagtctcgtttagtattttgattctttcttttcaaagttaggattagctgacatataaatcctgaagtgagcagatactagctatatgttcacttatatttcccttcccacactaaaagtgaacattttatctaggttgcttatccatatgtagcaaaacggctcctaacggatccaaatcctgcacttcgggaacgcttgatacaggttaaattgataattctgatttagtttcataaatgctatgttgaattgttatccgcatcagatgaaatcaaagctcttgttgccaccgcatgtcaggttctattcaaagatggtgttttccaatggaaaaggctagaaaaccttttatcacttgcaaaggaaaacgtcgccaagatgagtagcaatcctaatctacgagtaaagcgtgtgtaagtaaccaagttctatataagcattgctcccaaaatctcactcgttcaccctgtgaagcttgaattctaaatccgtatttgactcatgaaactttcagggagagtaagcttgacttgacagataccattaaggacggagctcgtcttttcctccttgacgaaggcatccgcaggaaacttattcttgcactcacagaggactcgaagcttcatgtagaagaggttcatacatcagacgtcaccagatttatatctatagcacttatcatcgccattgatgactctctaaagcaataaatttacatttgttctttcagcttgtggacgtatacagattggttgaagacgaagtagatattcccacactggccatgcaagtcgtgcaaggtaatagaacggaaaaacccccattttgcttcctttcttttttgtcttctcttcatctatcattcaaataataaagcttttgcatcaatagaagccttatggagagactatcacagatatgcattcctaacataactaagcctgaatcgatagctgaccatcaattctcttatgatccagtaaacataggaatcttggggcattgattgtaaattaacaagtagttttgtatgactgaagaatgtggttccttttgttttgaatgcagatttaccgaatgttttccgagattttgtgttgtcatggagcaactcagtattatccgacagatgatgaatcagcttctcacttactttttttggctctttttgaagaggaaagaggtaatatatattacagggagtagatggagaagaaaagcgtagattaatatatagtttaatcttcgatgcatacatgttattaacttatacaccaatccatacatgtaattatataaaagcacacacaaacttcacttcacttgttacccagtttgagtcttggtctcttggacgttgtctactgtagttggatatctaaacacattaatcgacgtcatcaaatcaaagttgtagtgttctcacaacacaactgattcacaatctggactcgaatgaattgaatcgttttgcgtctcttgggtcttggcctcgccctcgaatactggaaactaaactgaaccaaatgatattgagttatgcaattacacaaaaggtcccctcaattatccagtgtcattttctgctttcttgagctgtttggtttacaaaaatttaggtaggaatcggcataagattaaatcttatttgacagaaaattccattatcgccaaaaatttcaatcaataggcgccaaacatttcaatcaataggcgccaaaattggagaagtaaagggaaaaacacaaacgtaacaaggattcgagctctctctagacgatgcaagccaaaatcaattctttcttcaagccctcctcttcttcttctatcgctgcctcagtaacaacagacacagacgatggtttagctgtctgggagaacaatcggaacgccatcgtcaacacctaccagcgtcgatctgcgattaccgaaaggtaaatcaatgatctttggcggttttacttctctttaggttcttcgaatttcctactttatttgtgttcttcagatgaatagaaaatgagcgataggcaactcctgattttctgggtttcctttaagatatttttgggcgaaattggatttttttttttaattgggtgtctttttgtgtgtctcttaattttgggtattcagaagtgaagtgcttaaaggatgcatcgaaaagacgctgaagaaaggatcttcttctgtacctaaaaatcacaaaaagaagcgtaattatacacaattccacttagagttgggccaatctgattttcttctcagacattgcgcagaatgtggagctaagtatgctcctggagatgaattagatgagaagaaccatcaaagttttcacaaggactatatgtatggactcccttttaaggttaggatcacactgaccttattgctcaagatcatatgtttctttgattattgtagaggttattagataaattgttgggtgtttatatttggtctcagggttggcagaacgagaaagcgtttacatcacctttgttcatcaagaaccgcatcgttatggtatcagaaaatgattcccctgcacacagaaacaaggttcattgttttcacaattcaacttgcactgtttatggtaccgtacttcgtttctaaacgatggatcttttgcaattgcaggtgcaagaggttgtgaaaatgatggaggttgagttgggtgaggattggattcttcaccaacattgtaaggtatgagcctgtatccacgtcttaacaacagtcatttgcggataaattccatagctcatgagtgttgttttggtattttatgtctactatattgagttcatgggtatctgatacaccttgttgagaagcttggcgaatacttgctttactttggtccactataaatagaaaaacttcgacttagtctgattccttccatgtctatgactagcattgaaatcaaacaaaaaagtctatgatatctttagatgacctcatttcaataaattcacaagaaagatgatataacccctaattactttcctcagttgttttagaaactatcttgttatgtgtaggtttatctattcatatcctctcagaggatctctggatgtctagttgctgaaccaattaaggaagcatttaagctcatagcttctcctgatgatgaaagacagttacaaaaagagagctcatcctcgccttcaacctccattcagtttggaaacattgttctacaaagagaggtatcgaaaagatgtcgaacatcagatgatagattagataacggagtcattgtatgtgaagaagaagctaaaccagctgtttgtgggattagagcgatttgggtctcaccttctaatagaagaaaaggcatagccacatggttactcgataccacgaggttaacaactctagcaaactacctaaaacaattgtcatggtgaacaaacattcatacattatggtgacattttgtttgtttgtttgtataaaatcgcagggaaagcttttgcaacaatgggtgcatgctggagaaatctcagttagcattttcacaaccaagctccataggaagatcttttggatctaaatattttggaacttgttcattcttactttacaaagctcagctaattgatactcacttttcttaaacggcataggtttcatcacatcacaaccatcatcttcactgttactcctatttgtctgtcttttacatattagcaagttggtgaaatattgattggctgatcccataacaaacaaaaagagcaacacattcttttatttttatttttctgttttaagccgtgagtgtttctttatctaaagactgaaacaagaaaccaaacatgatccatatgtctagagattttcaagtagaaggtaccaagaaggatcaatgttcagtctcaattctcagtccaaagactaacgtttgaagccgtgggtaccatttaccatccaccaaacataacccaatccaattttttgtcttggttacttcgaacctcaagtctttgtctaatgacctctttaagccgtgtgtaacttgatatttttctaaagactgaaaaaagaaaccgaacatgatccatgtctagagatattcaagccgtgggtaccaagcaagatcaatgttttgtcttacgacttagtctaaagactaaagtttgcagccgtgggtaccatttaccttccaccaaacataacgcaatccaatcttttgtctaagagattggttacttcgaacctcaagtctctgtctaaagatctttttaagccgtgggtaacttgggctttgtctaaagactaaaacaagaaacaaaacataatccatatgtctagagatattcaagccgtgggtaccaagcaggatcaatgttcagtctcacgtctcagtctaaagactaaagtttgaagctgtgggtgccatttaccttccaccaaacataacctaatccaatattttgtctaaaggattagttactttgaacctcaagtctctgtctaaagactgttttaagccgtgggtatcttgagctttgtctaaagactgaaacaagaaacagaacatgatccaaatgtctagaaattttcaaggcgtgggtaccaagcatgatcaatgttcagtctcaattctcagtctaaagacaaaagtttaaagccgtgggtaccatttaccttacaccaaatataacccaatccaatcttttgtctaaaggatgggttacttcgaacctcaagtctctgtctaaagacttttctaagtcgtgggtaacttgatctttgtctaaagactgaaacaagaaactgaacatgatccatatgtcgagagattttcaagccatgtgtaccaagaaggatcaatgttcaatttcaatctaaagactaaagtttaaagccgtgggtaccaatttcctttcaccaaacataaccccatccaatcttttgtgtaaaggattggttacttcgaacctcaagtctctctccaaagacatgttttaagccgtgggtaaatagatctttgtctaaagactgacaaaagaaaccgaacatgatccatatgtttgagattttcaagccgtgggtaccaagaaggatcaatcttcagtctcaagtctcagtctaaagattagagtttgaagccgtgggtacaatttaccttccaccaaacataacccaatccaatcttttgtctaaagaattggttatattgaacctcaagtctctgtgtaaagactttttaagccgtgggtaacttgatttttgtctaaaaacacaagaaaccgaacatgatccatatgtctagatattttcaagccgagggtaccaagaaggatcaatgttcagtctcaagtctcagtctaaagactaagttagaagccgtgggtaccatcttccttccaccaaacataacccaatccaatcttttgtctaaagaattggttacttcgaaccccatgtctctgtctaaagactgttttaagccgtgagtaacttgatcattgtctaaaaagtgaaataagaaaccgaacatgatccatatgtctagatattttcaagccgagggtaccaagcaggatcaatgttctgtctcaagtctcaatctaaagactaaaatttgaagccgtgggtaccatttaccttccaccaaacataacccaatccaatcttttgtctaaagaattggttatattgaacctcaagtctctgtgtaaagacttttttaagccatgggtaacttgatttttgtctaaaaactgagacaagaaaccgaacataatccatatgtctagatattttcaagccgagggtaccaagaaggatcaatgttcagtctcaagtctcagtctaaagactaagttagaagccgtgggtaccatcttccttccaccaaacataacccaatccaatcttttgtctaaagaattggttacttcgaaccccatgtctctgtctaaagactgttttaagccgtgagtaacttgatcattgtctaaaaagtgaaacaagaaaccgaacatgatccatatgtctagatattttcaagccgagggtaccaagaaggatcaatgttcagtctcaagtctcaatctaaagactaaagtttgaagccgtgccattcctttcaccaaacataacccaatccagtattttgtctaaagattggtgttttcgaacctcaagtctctgtctgaagaattttttaagtcgtgggtaacttaatctttgtctaaagattgaaacaagaaaccgaacatgatccatatgtctatagattttaaagccgcgggtaccaaacaagatcaatgttcagacttttatttctaaagccgtgggtaattgtctaaagttcgaatcaaggatcaatgtgtgtttgaagccgtgggtaccctcttttccttgcaccaaacataacccaatccgaattttgtcccttaagtctctgtctaaagactttcttaagccgtctctgtctaaagacttttttaagccgtgggtaacttgagctttgtctaaaaactgaaacaagaaactgaacatgatccatatgtctagagattttaaagccatgggtacaaagaaggatcaatgttcagtctcaagtctaagtctaaagactaaagttttaagccgtgggtaacttgatctttgaccagtaaactgaaaccaattccaagtatatttgtcaaaataataagccgtgggtaaaagatcggttttcagtctcaggtcaaaatccctcataagccaacttgacgggacaatgtccccaagaaagaatctgacagaacactaatagttgagtgtctgcctatgatttctcttgggtttgaaagaaaaacaaaacaatgaagaaatcaaacaaacaaaacagcaaaacaagagcaacaaaaccacaaccgatcgcaacaataaagcggtacaaaaaaaacaaaacgaaaaccaaaacctaacacaaaaaggaagaaagcaacaatctttaattcacagaaactttgaaacgcagagtcgcgattcgtttggttttgcaaaacgaaaagagaaccaaacaaaaacatgataatagcaaaatttagaaaccctagaaatcaagtggattagaagaattcttacagtggttatcgctacaaatcttcttcggccataaatgtttcgatcgacagaaacatgcgaaacagagaaagagttgatgatatttaaatttagaaacactagaaatcaagagaattggaagattacttacaatggatttgtcgctccaaatcgtcttccgtcatgataaagcgatcgagagaaatatgccaaacaaagaatcaagaaggcagaacaaaattctaagaaaattatgacgctttctgataagctttcccgtttttatagacactatctaaaacggtgccagctggctgatttcctttttctataacgccgaatttccttttttttagttaacataactttacttatttctagtttctatttattaaaagtgggccttatgttagcccaatttaaattaatgggctcgttacatcacgcatagttttgcgatcatttttatttagcttttgtttgtttttgtgaattattattactccattagaacaagtcaaatacaagcttagaatttttaattctagataaacaaaaagcttcactcttcttttgtttgtcacaactttattgttatttagatttttaacgagtttaataagaaatggaaaaaaggagttttacttaatatagattgtttgatattattccaagcaaaccaaacaaaacaaaacaaaaacattagaaaaacaataaaaactagtcaaagctttttatgtattttgcaagaagaatttgttgatttatttcctaatttaaatttatatgtacagtaatttgaaaacttactatttgtgaaatactaacctgtagtatatttttgattatgttattttattaaaaaagtcgtcataaaatattttagattaatgaaagaaaccttccattaattaatatattaaggatattaaaatagctgctaatagtttaattagtgtattgaaaaggtaaaaatggttatggggattgagagaaaaaagctaccaactgcgaaacactatccccacaagcaaaccccatcatctcccttcttcttcttcttcttccacttccctttgtaactttcaatctcaggtcagcttcttcgatttccttctttatttctccatgtttttcatctgcttactgatttccaattcagtgatttggatccgtcgtttctaatttcgctagggttcttctgctctcatatgtttttatatcgcgatcagttttctaaaatcctttgattttgaatccgattctcactctctcttggtttcttcgtgtttcactagcaactgaatcgttttcatcgaattggttttagaggttttatcttttgcattcttatttgcagatttgagattgtgaaaaaaatacttattagtctccttttacattcatatattcagctaatatcaagtaacgtggaaaggatttgttccgtcaaaggttggtgattatacagagactgagttcctgataagttggattgagcttgttttcatttgcggatctttgagaaaaaagtttgcaactttatggctctggaacaacaacatgtttgtgaaaagcggcttcaagccaagaccttttctacccaagagtttcagttgactctcaattgggatgatttaacttgtcccatttgtttggatttccctcacaatggtgtgcttctccagtgttcttcttacggaaacggttgccgtgcttttgtctgcaatactgatcaccttcactctaactgtttggatcgtttcattagcgcctgtggtactgaatcacctcctgctcctgatgagcctcgctctaaggttttagaagagagttgcaaacctgtgtgtccactgtgtagaggagaagttactggctggcttgttgtagaagaagctcgtcttcgtcttgatgagaaaaaacgttgctgtgaggaagaacgatgcaggtttatgggtacttacttggagcttcgcaaacatgctcagtcagagcatccggattctcgtccttcagaaattgatccagcacggaagcttgactgggagaatttccagcagtcgtctgaaataatcgacgtgttgagcacaattcactcagaagttccaagaggagtggttttaggggactatgtgatcgaatatggagatgatgacacaggagatgaatttgaggatgttcccaacaatgaaggaaactggtggacatcttgtattctctatcaaatgtttgacaatataaggaatgccaggaatcgaagaagatcaagaatgagtgagagtaggagagggagtcgccgctctagctatgagaattccaactctgatgacagctcagtagcatccatagagtttccggagtatagagtagatgagatcgatgacgagttcatcagcacaagtggagctaacagaagtagctctatgcaccaaaggtcagaataatctatagctttacaccactaattttgtattgttgctgtctgcagagatatacattcttactttcatagtttataattattctgcattgatattaaaggcttaccagtgagcctggtttttaggcacctcttgaatgacaaattagctaatcaggccccattgtgtgatatttctggcataatagcttggggtgttgacctggtttagtagctttcttgtgctatatatgatggttacttaagagacattgcttgatgccttgttttctctgatttacagttcaagaaggcgtcgaacccgcttctatgaaaattaggtattaaccttctgtttctatgcttttggtactgtcttcttgtgaatctgtaatgttccttttcgttctttctcagtcagctggaaaatgaagcgaagcaaatgatgcagaccagcctatttgtagccagtgttcttggttttggacctctttcttctttttctttttgtttctacacataaattttattttaggtttgtcttgtgacattactcgcagcagtcgcagcctttgtacaaaaactaaacaaaaagcctttttgggatattgtagtacccttttgtcgttgtctcttctttgttttacatgcatctctggacaatgtagatattgagagtaaatcagaagtcaacgttcgtgtattaatttttaacatttctatttcagtgaacatactctttttaaagcttactcttattaccaagtagcaacacaacttggtcaaagactcaaaagtacatgaaatcatcatacaatccaacacttgagaacaagtggcacatacacagaaactaatatgggacgttattgggcaagtttcttatgacattactcttcactccgatcttggtacgcattgtctcgcctctcttgctcatctccttgcgcactttcatcctcaaagtctcctctttcgacggtactgtcttcagacccaggctcttgtacctgagaatttaccatttgttggaataaccttagtttaccttgccgattatctgattggatagactcggatgattaacgggtttggagaaaacaaaccttgaagataaagaggcaattatctggttgctgtcttgagaagttgggcgtggcttctgtctgtagtaacgcatgaattcacgggacccgagagttttagacgttgttgtgttctcggacttctccgtgatcaagagctcagaaccaccaacgagttctacagtattgtctgtttcaccagatacaacaatttgctttccagcttcatcaacatagctgctcaattcatatattccaaagaaaggtgcggattaagatttggcatagaacgaggaatacaggcgagaacaagaataatcagagatagaagagagttgaaacctgctgctgtagtcataaaactcttctagctcagcatcttcttcatcatcaccatcaccataatgcagtttgcaatgactctttgcttccatatgttttcttacagcttctaagctgctgaatggacggcacagctcattgcagtacagacacatgaagtctctcttgacctaaatgatgagcaatgtataagtaaacaggagtaagaatttcaaagcttgacaacaacgaacactgaatggtaaattgatgagtccaaaccttaagaccaaggtaagtgagaagcccttcaggatccttgagatactcaatatcgggaataaagaaaccatgatgcttatgcatgtgaagcatacagctctctaaggtcttatgttttttgtcacacatcaaacagcaggttggatccagctcatacttatctgcatcaccatcatcatccatatcttcagcagatccagactcattcacattcaacttagacaaagaatcagaggcttcttcagcagccaattcctcgtcagaatcaacctccacccattcatcttcactatcatcatcaatggaacccctgtgttgaacacggcgaggaagttgcctgataatcgctatatcctcctctccgttgattgatgtcccttgtgaaacccgcaaaacatggctacgcgactgaagatgctgctcatgagccttggaactcctgtaacctttagcacagattgcacaagtataaagcataggtgcttcatttgatttattcttctcctgagcaagagcagattgtctagcctcaaacaaggcttctgtaactccaggaactccagccacctaacataaaaaattacagaaatacaaagattcaaatgcctagaagtaaccaaatctatgattattgaaatccttgttccttagtagaataagcttcaaaacaaattttcatataaactctacgattccataaccttaactaaacaatttcgatagcaaaatggaaaagctgtttctcagaaactttcatctcatcaccgacgcaagattttcccgagaaacagataggcttgagttcaaattcgatagagaaagcagaagaaatgaaaccttgcgcttgagattgtagcggtgccaatcggatttgtaatgaaggttacgttcttcttcgtccttgaactccatgttacacgcgttacatgttaaaccaggcatcttctctccttcaatatcgatcgattctagaaatggaaactggagaagaaaagaaaatcagagaaaagatagttgggaggataagatttgttgttgatatgtgtagagcaacgacggctcgtaaatggatcggcgatcgtgtttgtctctaaaaaagcgtcgattgatgatgattgattgccatcaaaatgaaaaggaaggcgccccgcccattttagatccgatcgggttggaactgacccgttcctgacccgatacaagagtagcccatttggcccattcttttagcctttttgtaacactgacacagttgacgaattaagtattactgtatgagtaaccaaaaaacatttttctaatattgtttttaaaataactacttacaacttgattaattacttcgtttaatcatgtaacttttttttcttccaaattctaatctctctattaaattactgcatttataagatctaaacatcatgtgatatgttcaaaatatgaaaagagaagaatataatacatgattttactacgattaattttttttaatcgcaatgttttgtttttgcctaattttattagtggaagaaattttaaccgcaggcctgtaatttaggaaactaactattcacccccaattaaaaaaaaaaacaagaagacgacaaataacgagaaattaccaatttttcctcaacactttcattatttcctacaacgaacttctccctcctcctctcactttcaccatggattccgtctccggttacgccgccggagcaggtcagcctcgagtcggtgggaaaattgttcgaccacgacgcaccgctgttgtcaggacgccgtgtgagcgccccgttcagagatcccgagatcctcctcagcaaaaccctagttggatctccaggctcgtttacaaacccgccagcgtaattgcttccggcgccggaaaattcatttcttccgtcgtcttctccgactcttcctcatcttcggaggaggacgaggattcatcttcaggtttgtaccatttatttcagtttagataggattaatttgaatttttggtttattgtctggtcgaatctgaaagctaccgtttcgtttgaaatgtgaagtttgacttaaagctttcccattttctctttcctttaatatgtgggacttaagagcagttaagcattgttgtactctatttagttaggttacttctaagctataaacttcatactaattctaaagctctaatttttattcatataatgtagttctgggattgagaataccaaccagctttgttgtgtcttattcttttaatgtatggatttttatatgttttcttctttgtttgcagatattgatggtgatgaggatgttgagaagaacaatcccgattttactgaagaggtactaaccaccttgttcgttttggtgattgctatgccactgtagtcctatgataattgtttgaagtaaagttcgtgaagctaacacgttttcaactgagagttttttttataaaagcataatttcagtttttgtgcttgtgtgaataggaccttctgagtgcccagcaaccaagcattcaacgactcagttctaagcgtgtaattgagcagcttctcttgcaagaaacatttgcaaggtatttctctgcctggctttttggacatcataagtagcagcctcctcgactattcttattatttacacctcatagcttaaagaatctttctgagacgtgtgtagttaccaaatctaagctgatcttgtatcctgcttattcattcatgtgtatgttgtttcagggaagagggtgataggttaatagatatcatcaaggctagggttgtagatcatcccagcgtcccctctgctattgagacgagtcatgatgactatggattgacaagcggtatgttactgatggtagactgtgcaagtagaccggattagtctatgtgataacgtcttcttttctattttatttctagacgtgaatgtgggtgaaatgtccaatacagctgtcatggaagcaagaaaatggttggaggagaagaaatcaggatcaagttcaaagtataaagtaagttctggaaacttgcttcttaactgttctaattgctgcagcctgcaggtatcaacttttttgtgatatcttgtctccgtgctctaagccattattattatagaaggagacatcttctgtttgggtaaaatgatttgattgttatatgccaatccatgtgatcagcaacttaaagctctcttgcaaaagtaggttgttcagaattctgcgtgtggccatctggtgacgttaattctgaaatgtcctgattgggaaatacctttttgtccgcttaaaatgcaaaagatccatattgttgctcttcttttgactatgaagaccatttacttacatgattttggtcaacttctgatagcttcgcttcacagtattctttttccattgtactttaaatgatgatcaccatctcagccattagtttaaatctccaggcaactgaagatggtgctggatcgcctgtggacgtggccaagtcttatatgcgagctcgtctgccatggggatctccagctgcgaataatttagattttcgatcaccatcatcagcaagagtgcaagggacaccccttccttatagcgctggaaacttttcctcatccaaggttagaattttaagttctccagcagtgcatacttttcttttggtcaaatgttgtttgaaagtctgaagtcgtttcatcttggtttatgagataaaattctctgcttaacttctattgtttatgttagataaccacgaggaatttgtgggacactatttccagctattcctaaagaaaagttgcataccgttatatgtattttcaatggctctctcaaatttacccttattcattctgacattggttaccaaatgcagctgaaaaggaagtccggttctaatcagtcatggaatattcaagatgaaattcgcaaagtcagagctaaagcaaccgaggaaatgcttaaaagtcccagtagtgtagcctctttggaacctaaatacagcccctatgttttagcgactgatatgctcaaaggaaatgcttcgtctttgaatgctgatggaggtgttttttttctttctttattcacacgtggaagaagtttttcagtaagacatgagttgaaactgaaattaactcttcttttctgttctttcagctgtacggaatgaacaaagcagagctctaccaaattcagccatacctacctctgagcacaatcaggtatcaagcactctttacactatgtgtctctcattaccaagaaaaaacttgcagttccaatctttcttgttttggtgtccttgtgtgttttacttgagtgaagactacggaagctaatcaagccgtcaaagaaacaggagttttacacactagatctcgttagtttctcccttaatccttaatttgtatacactctctcatcttcgctttttatactctgtctcatggatttaatgtgttctgattaggtggagttggtttggaggagacatttatctccacacaaggagtcaagccatctgaagatacgaataccgctcctcaaaggttctttttattgtgcttatccttccaacacagattgtaccttgtttctttttgacagatatgttttttagtatatcaatcttctgaagtttttcaactgtatgcgacagtggaactgctgtagatgacttcaatgatcaagatggcgattttatccaacctacttctactatcggaaacaccacaaatggtatacattggatgttgaattcctttggttctgatttttagttgggttctcttaatttacttgcgctcctattgatgcagctgtcttggctcttggggcaactttggatcctactgggaactcttgcatccctaaagatgtgtttgaaacatcaaaagaagctgatgaaataggcgcatcacgtcatacttctaacggtttcccatcttcatcacctaggtgaaaagcaactcctttgtctggctagtttgacatgatgacattatttcctcctaagcaaagccttactttttcagttcaccagcggttatggaaggtcaaccaaaacccacaccaccagaagaaaccaaggcttctcagcctatagctgaaattcatggtgatgatatgacagtagggaatggctcagatggtgcaattaataacgaaagcaatgacagccactcaagtgcctctaacagttcaagcacccatgaagaagagtggctcccaggagaccagtctctacctaactcaaactcagcaagtagcagcccgggaaataccaaggtcttggcatacagcagaagaggaagaggccgaggtagaggaagaggcagaggaggtcgaggcaaaggacgggccaaataaactttgtaagatgagctgtacacaacaaacacaatgcagtaggagagtattatgatgaggtaggattatgtgacatctcttttagatttgaatcccactctgtttgtgtttggtctttggtcacttcgttatctttttaggttatcttgtagtatttgagttaggaggatttgtcttgtcgagttatgtggaattgtgtctctgttgtttctttcatttgtctgaaatctctaatgtttaatgttgtaagtttgaagcttggtttcgttccagctgacgaagctttgtagtttgcagtttccatatgttgaaactctttttcttttgttcgatgccaaatttttaaatcttttttacttgaccaaaaagccaacacctaatttttttgggggaaatctcaagtactaacaccactcatcttttaacctcgtaaagtgtcaagtaaacaaattctgacatgatccaatattagatgagatcactcagatcaaaacattgtaagatgaatataatcaaatgggttcaatctagtgttacacaatctcttaccaaagtacaaaagcaataacgagcgaaaagaagaaacccaataaccaattttatcaagacagacagaaagagagagagaaaaaacaaaacagacagaaacaaaagtgaagaaaaacgaacaacaaaaacccaataagcagcgatcgaagctaaaataaacacagaagagcgaaagcgctcagacattcaaatctgaaaagccatacgaaagaagaagccacgaagattcaatcgaagcagaagtgtattattaagaagccgagaaatcattgggttggtgtcggaactcggaagttacttgttttgttccgatttttcttttgtctgaattctttctggtcaaatcttccaacacttgttcttctgcttacaagcttgggtcccgcttctcattgcccgcttcctccttcttcaattcgaatttcatcattctttaggcaattcgaatctgttgctctgttctcaaagctccaatcatttgttcaactcaactgatctcgatttgctccaactcaaatttcgggaattctcaaagttcttagcttccgaattgggcgtgaaacaaaaaatgcggggtttttctgctctgattcagtttcgtcttcttactcgctcgtgaacttggagaaacggttagttggattgattcttccttcttgatggattgatttgctaattccaagctagggtttgtaatatactctgattctgaaacagccgaggttgaatttcaaagctggctagtagataatgatctctagggtttgggtttttggggagatgagattggagtggcctgtactaaaaagcttcagctgagttcttgaaatgcttctggatttgagtttgagaataaatacgttgatgagttgggtttgtttgtgtgaaggataactagaagctgagagggtgcattttgtgcactcctctgactgtttcacttagtttcggtttagaagaagaagccagaaagaagtatgcaacgtcttcaagatcccaggattgatctagctgagctaaaagtgcatatagtgaagaaggttggggttgaaagatctacaaggtatttttactacttgggcaggtttctgagtcagaagcttactaagagtgagtttgataagtcatgtttccgtcttttggggagagagaatctttctcttcacaataagttgattcgttccatcttgagaaatgcatctctggctaagtccccaccatcagttcaccaatccggtcaccctggcaaatctttggtgcttgggaaagaagatggacctgaagaaagcagatctctaaaccctgaccatattaggaatgatcttgctttgtccaatggggtgttagccaaggttaggcctggaacatgtgacgacaggacaatcagagataagccttgtccgctagggtcaaacggaaaggttttgggtccttttgcttattcaagacctggtcgatatcctgatgaaagagacagtgcatttctttgccctgctgaacaaaaggcggtttccggtaaagatcaggttgcagctccaattagcagagatgatgaagctcaagtaaggattctttccacacctcctgtaatggcacctctggggattccattttgttcggctagtgtcggtggggaccgcagaacagttccagtttcgaccagcgcagctgctatcagttgctatgacagtggtggattatcagatacagagatgctgaggaagaggatggagaatattgcagtaacacagggtcttggaggggtttcagcggagtgttctattgttttaaataacatgttggacttgtacctgaagaaactaatgaaatcatgcgttgatttggctggagctcggtccatgaatggaacgcctggaaaacacagtttagaaaaacagcagagccgagacgagcttgtaaatggggtgcgaacgaataatagttttcacatacaaactagcaaccaaccatctgacataacgcgagaacaacattcagtgtctttgcttgattttagagttgcaatggagctaaatccacatcaacttggtgaagactggccattgctacgggaaagaatttccatatctttattcgaggaacgagaaggggtgtaaaagaaaatgcttggcatgttggatgctgcaaattgtctgagtaagctctctggtccaaaaaaactggccactgattttggtagcagaacgattcttgagctctgcatcccatgtggacatgatggctgattgacacaactatgtcctgcagccgcaaactcggggcaggttagtagatatgaatgaatacgtgttgttgtaagatcaaaagaaatttggccattcctgcgagtatcaagctttgtgtgtaaacccaggccgataaggaaatcaagagaaagttttggctgagatactgtgggttttaggcaagagcaaggtataaacaatcatgtaatagttgcagtattgctctgtatgtaacatagtcttagaattgttttagaattcatatcttgaagacacattgacatcacttttacatttacatttacatttttgttacctcatttcaatgaaaaagttattttcaaaatcagtaaaattgcctcatttttattttttactactggttggttttcttgcttgtttcgttttccctacaaggtattgacatcaactatttcagatgatcccatcaagtaatattcagattctaaatcccttgatgaatctgctttcggtttctcattctatccaccagcaattgttgctttcttttttgggaaacctttggctcttacttcgaaaatatgcagaatgcgactccagtttcttttttgaatgtctttctaagttttctcttaagtccatagatccaaagaaccacgctctttgttgcttttcaacaaattgtccaattttaagaattaaaagatcatgtttacttgatcttcaaagttcaaatgaaatcgtttccgtctttcccactttacattacggaagtcaacagtaaagagaggaaaagacaagagaaacacaggatagctttgtcattagacaaaagggagagagagacagagccggtgtgaattggtatgtacacaaaggaaatggtgaggccttttttacgcaggttccattgttgttcacaggctttagatgaaagaactaatacaacgaacgaggaagaagaagaagacggttatttagaggaggtttcggctgtggctttgcagattgggcaccaactctttatccgcaaccactcttgcacacacttcacatggtatgtgtgctcacagtgtagcctcccaacttcatctccaatcgtatattcttcctgagaataacaaagatcagagtatgaagaactgtagagaaaagggaaagaaaacttctgattttacatatacatatcagttctatatccaccatcatgtcatcaatgaaacgcctgtaatcatcaaagatttcggtgttgttcacttagctaaatcaacccatgacaggttttacttaagatttcatcaaagccaaagacttgattatgactaacaaaagggacagacctggcagatgctgcatttggcatcttccttgttatcactaggacttttggtgatagacccataactcaaaggtttcatctgatagatacttgttttcaagcactttgatattgcttcttctgtcaaagcagtgcttactgtaccaatcctctcttctagagctaatagttcctgtattcaatcaaaagaaaagacaaaacggtaaagatactacatcccaaaacaaaacgtgggtttcaaagatgtaaagacgaacctcatatgacatgttatcgatgtctagcctcatgtctcggtgttggtcatggaagcttagtccaccgagaagtaaacctgtttccatgataagcagatcctgctcaaagagaggaaaatatgagtaacaacacgcatcacaatatctgaaactcaaaagtcaaaacatgtgttaataatattcaacctcataattaagttcgatatcttgttcgatcctatcaagttctggcagaatctgcaaaagcatccgagaaacataaaacaacaaaagttaaacggtgttaagggaattgtcgtaagcactatttgatgatgctcagacaagatagatgtctcgtagagtaagtaacagacaatagttacctcggagatcccatctaaattataactgcgaaaactgtcatgactcaataaggaaccagagaggccaaattctggaaaaccagagaacagctccaaagagacaggagaattgagattgtttgatgtttcagtctgagacatctctgctgccgtgacagaggataaaccgtctctaccactccctctaatgcgactattatttctatttgccaatctctgactcccaactgaagcaacatcgttgtcatcatccaaaatgcagtgtctagcccgtctactatcagaaacagaacctctcggattaaaactacgacgtctcacttcaactggtggaggttctgttacattcttccccctagctgaggagctagaactgctttctccgtaaacttttgtcttactgattgtatctgccttccgacttaatcttttgtccaatccaaaaccacttggaatgacacctgacaacaacgggctgcatccccggttagcagatgttgactggccagatggaccaggatgaaactcttgcttgctcaacccaaatctctgcctaaaacctctcttgattcttgagcttgatggcaactttgagcattccgcttcaggtgttataacttttccataaataagtttattgttcattcttcttttatctcttccaagaggaacttgcaagatttctgactctacctcgtcttcactacctctgctgctctctgatgaatcaatggctatctgagaaaacggttgcttctcaccacttttcacagaagaggagctagagatacaaatcttagaggaagttccaattacttccttcccgtttggcgaagagcggtatgtagacaacactgatttctctttcttatctgaagagccaacaaacctagtaaagttcattgattttttctcatcactacaaataggaaccttgcaactattgctgttaaatctatctctaaaaacaacaccacccttcttcttagagtcaggtctcgcctccatggctcttttactggaccacctatccatgaactttttaaatggatgcaatacctgtaacaaaaatattccttattttagttaaccaaaactattcattgggacttaaaagttcgccaaagaataaaaaaaaacacaggaaaaacagatcagagactgaaagaaaacaacgagcaaaagatcaatacatattcatactctctgagactaaactgcgaaaacctgcaaattcaaaacctttgcaccagacataaaagtattcattagaagaaaacattgttgttatgaaactcttgtaataacgatcttaacaatcaacagccaaacttaaagtgcttcaatcacaaaagtctatagctaaaagcttatcatctgtgatggttcaaataaaaatgaaacctttcataagatgatgatccaaaggatgcctataatcacttctcaataaagaatcatcttgacaaggaactaataaaacaatcaaatttcttgaacatgaagagaaacaattctcaacaataatacatgtgtctctctatacacaagtgattggagagaaacaaaaacagaacatgttttcattttttgttacctggtctaaacaaaagagagttacaacttaaaaatcgattcagaatcaagaacagtaacatcattcatttccaaaacatcacaaacacaaaaaaaaagtcaatttgtctcaaaacataaaaaaaaattccatgataaaggaagatttttagaagttaagctgtttattttgttcgatgattacctttagctttcgtccaatcttgttcctggaaattggaagatggagaaaaatagaagagcgttttgttcttgttgccgatattttttcttcggttttttattatgttattttaagtaatttatctttttggaattaagaataaatcaaatatttgtttttattccataatgaccttaaagcaaatattcattaaattttatatcgaaagaaagaatctgagatgacgaagacgcagagatcctcgccgtcgataatggggtcggaatatctgacggttggtagagattacgacgtctctaggtagtggtagagaactaaagatattaaacaaaagttattatgaccaaaatcttttttaaagaactaaattttgtttggttagaagatggaaaaagaaaacaaaatcatgagaattcgataagtagtatttggtgatgatgccacgactaaggataatctagtttaattatctgtcctctattatagcaacaaacctcttagcctttatccttgatttttgtatttttaatctctctttctttattatttggcttttctaaaaaaaataaagtatcagattatttgttgtgactttatggtagagcaacaaaattctttaaatttaaaatatttggtggatccaaatcaaatgtatgaaatgaatggttaaatgattgataacataaatacatactacaactgaaataaatacaaaatcagaaaaaatcactaacacacatgatttatatgaacaaaatttcaatttattttggatatattgtataatactaaaatcactaaaaggtcacccaccattggagatgaggaatcgaaagaaaatgacaagtatgtaaaaatggtaaataaagatttcaaagaggtgtaaaccatttattacaagactttttcgacattgatcaaagtcaaaacgctgagttatgggattcgtagggaggaatcgaacctataacctacaacctcacatacctctcacatcttccaaaatctaaaaacgttgaagaaactcagcaaaagaaaagagagcagccactaagctttagcttctaaccacccattatcatcttcttggtgtgactctgaccctccaccaccttcaatagaagcttcttcatcacctttgtttcctccacctttctttcgaaacgtccttctagcttcccgacgagcatctttcttagctatattcaagtctttgaatccttgttccaacttggcttcatcctctggattgaagaaggctacttccatttgacccagctctgcatatcttgcctctactttggttttccagtaaagacccatctctgtgtccatcttttggtatggtgttttcagcaggtactcgtctattcctcctgctttgtcgatgcagcgaagagcgtgtgttgtgactttgactttaatgtgactgtcgaatatgtagctgaacaatcgcttctcctggacattcggtttccaacatcttcttgacctgttctcaaatcacaccacaaacaagttaccaaacaatacagaagaaatcagattaaaactcataagtatcctacatttctctagaaaggggatagatttcatcacaccattgttcaaatattgagaatctttagagtagcatgatacagaaacaaaacaacaatgccatcttcaggcaacaaatgagagatgctaaacaaaatgaggcactataaaatctctaaccatctaagatttcgaaccctcttaaatagtttcagatttctaccaaattgaaacctaaatccatgaagcattcctaagaacctgtagtttagctcctccgatgcttgaatattaagcaaaaccatcacaagctctaaatccgaccaacctcaaccgactacacatacacatataaacagatagagaggcatagagagaaagagacaaacttgtttccaccgtcttcactgacacggtttccgtactggatgtggcggccggcgtagagaccgcgtttggctctgcccatgacgactttggtatcaggaacacaagccttgagcttctccttgagctccggcgtgatattctccgctccaactttctttaccagcttcttcatcatctccttccctctaaacgccattttcgtttctcctcagaaaatcacagatcgcaaaacctactcttccccaaatgcttttctctgtgcttggtatgacctggaaatggaaacaaatcggtttagctaacgattttaattaaaccggacaaaattagccagtaaaatccggtatggtatttcgcctgcttgctgcgtcgctcgtatcagactccgattgaataagaataaatgaatcgtcgaatcaagataaacagacgacaggatcgaggagaagctgacctgaagtgaaccaaaccacataaatggtcaagcaacgagagagaagaagcagaaatgaaactgacgatggcacgagtcgaggtttcggccggcgatgagaaccggcgtcgatcttagccatagggttcaatttctgagttttgaagcgttgggcttttttaattcgttggctcttaggcccaaattaattctctcattaatttacggttcggttttaatcggttctaatttgtcaatccggataaaaagtcaataacatctaacatagaccaaaccattatcccaaagaaaaaaaaaacatagaccaaaccaagtcaacatgaattgaaatttaagaacctcggtcctcccaactcaaccgaaacacaatcaaaccggccaaacattgttttttttacggcaacaaagatatatcaaaacacaaattgcaacactaaaaatcatgtgttttattggtgccttatataacaaatgaaaccttacccgaaaggtttagcatatatgacatccagacaagagaaaacgtaattcatcattttcgttatctaacatacaagaatcaaaacaagatttcacattaacaaagataaagtgtacatagttgaggaaaataaaggtaaagataaagtgtagacaatattcaaaagggtggttgtccaacaatgttaccaggaggatcatagttacaaataataaatgtgtcaccggtcttgcaaaaactgattgcacacccaatcctcgaactcttcttccatacaagttgcgtgtaatgcaaacaatccccattcgccttgcagtgggaagtcctccggtcatagtatttcatctccgaggcccatgcagccaccgcatcccgtggagtccaaccttttccgcttccccagaagagattctccccgtaaggtcccccggagtggataagtttgcaatctccacggcgggttctggcccaccggctcgcatagagggcgaggctattgctccatttgagaggagggagacgaagcttggctcgtaagatgttgtgtggtcggagaaactgctgctgaatggtgttgcgggctagagctttgtcttgagaaaaaattagtgttgatgttgtcggtgttctgtttgatgggatttgaaaagagagagaaggaagtggagtgctgataactatgataatgatgatgaatatcagagttttttgttccattgggatgctaagttagatttgtttctgagcctctagatctagctagtacgatccttaccatatatatatacacacacacacataattgtttatgctttcatatttgtacgtatatatcatctaacgaatctaaacacatgctatgttaataatgcgcaatgacaagtgctaatcatttcggtggaacattgattatttgtagggaatgattttattcaaacaaagcatacattattgagctaattaatagatcattatatatgaaggaagttttaataggatgttttctttttttcttgtaagaagagactttatcatagcaacgagaatatatcccaagcataaaacattatatacaaactcattcaaatgaaaacctaagttagatatttaatttgaccactcttaaaatacttgtttagttataacatgtttactatgcagatttatgaggcgtatcagatggtgtgctagagaacgtgatacaaatttggatgccttgttttcaagaaatcttatacattccttggagatcaatttgtattgtgaggcttatagtcattgagcttaccgttgattaactaaatttatattatatagaacatcaaatagacgaaaaaaatcaatttagttgaccaccgtttgttagctaggttataaactctgacccaaagtgtcctatgctttcagtattcagtttattttataacgtgtggggtcgttttggaaacaattaaaacaataggggctatatttttctcaagttctgttggactgggcttgtcgttaatcaatatttgggcttttgaggttgactcgcttttttccgttcttcgttttccaaaatcaaacccaaaaggatttggaggagttaattcacctgacgaatccaccaccataatattaagcacatttgatctctcacttccttggtgcgagtgttttgttttccgagatccaaaatcttctcttggatccaaagctgtgttactgtggatctcctcctcctctctccctggatctcgtacctttgaggtttgtctctctgtgttaaacttgcgactcagatttcatagagatcgatcccacttttgccttttcctttgtgaaaatctacaatgttcaattattctctggcgctctttgtttgatctcgttgaatattgatctgattccggtaggaaaccgattttcatgtttgtgcagctgagtgagactgcgaattatgtagatttcattgtttgttcatctaatctggggagatagatcgcattttttttttttttgaattttggttgatccgaagctgttttaactgatttttcgtttttatgttattattttggtcgtagttgtagtacagtgatgtgtattgctggatctgaggatttagatttgtcaatgttttgcatctttgggtctctgattggacattaccgaatattcttctgaaattatgatgttttctcataaaccacggattcgagaatagagatcatgtattcaatgtattgaaatccaagcagagaggtatggattatcgccgatgatactgttgaacttcttgtatagaacttactctagcactgatgaggacactagtaaggtgcttatattcagtaattcgaacttgaaatcgccagaaatattaaaagttttgatatcttgtttttacttgtgatctatacttcattatgtctttaatcaattgtaacaattttgctctattcatcttctatttcttatattaacaaaggaacacttgttcgtgaatggtttttccttttcatttgagctcacagatttttttctctttcactttttgtgcagcaccggagaagatggacaaatctagtaccatgcttgttcactatgacaaagggactccagcagttgctaatgagattaaagaagctctcgaaggaaatgatgttgaagctaaagttgatgccatgaagaaggcaattatgcttttgctgaatggtgaaaccattcctcagcttttcataaccattataagatatgtgctaccttctgaggaccacacaatccaaaagcttctgttgctgtacctggagctgattgaaaagactgattctaaggggaaggtgttacctgaaatgattttgatatgccagaatcttcgtaataaccttcagcatcctaatgagtacatccgtggagtgacactgaggtttctctgccggatgaaggagactgaaattgtggagcctttaactccatcagtgttacaaaatctggagcatcgccatccatttgttcgcaggaatgccattctggccatcatgtcgatatataagcttccacaaggcgaccaactctttgtggatgcgcctgaaatgatcgagaaagttctatcaaccgaacaagatccttctgccaagagaaatgcatttctaatgctctttacctgtgctgaagaacgtgcagtgaattatcttctgagcaatgttgacaaggtttcagactggaatgaatcacttcagatggtggtgctggagttgattcgaagtgtgtgtaagactaaaccagcagagaaggggaaatatattaagattattatttctctgttaagtgctacttcttctgcagttatctatgaatgtgctgggacacttgtttctctctcatctgcccctactgcgattcgggctgctgccaacacctactgccaacttcttctttctcagagtgacaacaatgtgaagcttattttactcgatcggttgtatgagcttaagacattgcacagagatatcatggttgagttgataatagatgtgctcagagcactctcaagcccaaaccttgatatccgcaggaagacgcttgacatttcccttgacttgattacccatcataatatcaatgaggtcgttcaaatgttgaagaaagaagttgtgaagacacagagtggagaacttgagaagaatggggagtacagacaaatgcttattcaagccatccacgcttgtgcagtgaagttccccgaagttgcaagcacagtggtccaccttctgatggacttcttgggagatagcaatgtggcttcagctcttgacgtggttgtttttgttagagagataatagaaacaaatcccaagttaagagtttcaatcatcacaaggttattggacacgttctatcagatccgagcaggaaaggtctgcccttgtgccctttggataattggggagtattgcctatcactttcggaagttgagagtggcatttcaactatcacgcaatgccttggcgaattaccattttactctgtttctgaggagtctgagccaactgagacatcaaagaagattcagcctacctcttctgccatggtgtcctctagaaagccagtgattcttgctgatggaacttatgctacccaaagcgcagcctctgaaaccacattctcctcacctacagttgttcaaggatcactgacttctggaaatttgagagcactgctactaactggtgattttttcctcggagcagtggttgcttgcacgttgaccaaacttgttcttaggttagaagaggttcagtcttctaaaactgaagtaaataagacagtcacacaggctttgttgatcatggtttctatgttgcaacttgggcaatctcctgtttctccacaccctattgataatgattcgtatgagaggattgtgttgtgcataaaattgctttgccataggaatgatgagatgaaaaagatatggttagaatcctgccgccagagttttgtcaagatgatttctgaaaaacagcttagagagatggaggaactgaaggcgaagacccaaacaacgcatgctcaacctgatgatctaattgacttcttccatctaaagagtcggaaggtattattacttcctaagcttccctttgctttattgggtttttttttccatatgagttttccttttcaatctgttcagttctgttacgttggtgtctactttttcttacagttcatatccaattttttttttcgcattctcaaagaaagttcgaaagttgatagtggcatgttatgtttatttatttcggtcagtagttgaaattactgacgataagtttctttcagggaatgagtcaacttgagttggaagaccaagtacaagatgacctaaagcgtgcaactggagaattcaccaaggacgagaacgatgctaacaaacttaaccgcattcttcaactcacaggattcagtgacccagtctatgctgaagcatatgtgacggtacaccattatgatattgctcttgaagttacagtaatcaaccgaaccaaggaaacccttcagaacttgtgcttggagttagcaaccatgggtgatctcaaacttgttgagcgtcctcagaactacagtctggcacctgaaagaagcatgcagattaaagcaaacatcaaggtgtcgtccacagagacgggagtcatattcgggaacatcgtctatgagacatcaaatgtaatggagcgaaacgtcgttgttcttaatgacatacacattgatatcatggactatatctcccctgctgtgtgttcagaggttgctttcagaactatgtgggcagagttcgaatgggaaaacaaggtaatttattgaaaccttttatagttgtaccttcttttcgtatgtttgttggagtttggtataaccaattcctgttgtattctttatgtcaggttgctgtgaacaccacaatacaaaacgaaagagaattcctcgaccacattatcaaatctacaaacatgaaatgtctcactgctccgtaagtgtaaattcttctttcatcctgtagaaacgaaaaactcttcttactaattaatacttctttacttgcagatccgcaatagaaggcgaatgtggattccttgcagcaaacttatacgcaaaaagtgtatttggtgaggatgctcttgtgaatgtgagtattgagaagcaaacggatggagcattgagtggttacataaggataaggagcaagacgcaagggattgccctaagtcttggggacaaaatcaccctcaaacaaaagggtagtagctgaggttagctaatcttttcaaaacatattctatttctcgattaatacatgttttaatccttaaaccgcaattggtctaaatttcagtaccataccgatgatttctcacagtggcgtgcaaaggtaacaggtttagactacgtacgtttctcttgagcaattatcgttggttgaatctgcttattatatggagggaggaggcgttcaagggtatatgtaaaaagagtaattggctatcgttcttacttaaccggtatattttctggtatggtaccgatggatttcttcatctcatatggcagtgtgttttttactgtactagacgattttgttttatttgtaatgctttttcttctataatgtcgtttgttgaggactttaaaccgtgaactttatgatattgtagatttcaaagctacatttggtttgctccattttagaactcgtcatttcagatttgatctctattcttttctttcatatgcatttgaagtgaactattcaattgtcaaagctagactttaatttgctagtagctatataatacgggttatgttagcaagtaagttgtaatgaaacgcatgtattaatatggaccatattcaaaatctacaagccaaagaaaccaattgcttcacaaccaaacccataacatttgattcttacagccttttctattctcaagaaaaccaagcaataatttttaagcaaaatttaataatcttaaatcacttgcctcaaggtaccaagggacgatcacatacacattcgcgtaactagatatcgctaacatcattagacaagaaaatactagacgcgagtagaagaggaaagatccaaatacatcatcttctatcataaaatcatccatctctaaccgaaagttggagcacgtttcaaggaaaaactgacataattcctaattacgctcacttttaaaagtttggggtcgttttggaaacaataaaaaagtaggggctatgctttctcaacttctattggactgggcttgtcaacaatcaatatttgggcctgcgaggttgactcgcttctttccgttcttcgttttccaaacagaaggaaaaaaaactaaaaaacaaaatcggatttggaggagtaaacacaagggaagacgaatccacgataatattaaggacatttcataatctctcactttgtgcgagtgtttttttttccgagatccaaaatcttctaacggatccaaagctttgttactccgtggatctcctaccttgaggttcgtctctatctgttaaacttgcgactcagatttcgtagagatcgatcccacttttgcttttcctttgtgaaaatctacaatgttcaatattctctggcgttctttgcttgatctcgttgaatattgatccgatcccggtaggcaaacgattttcatgtttgtgcagctgagtgagactgcgaactatgtagattccattgtttgttcatcaaatctggggagatatattgcatttgtgatatgaactttggttgatccgaagcttttttattattcgattttatgttaatgttttggtcgtagttgtagtaaaagtgatgtgtattgctggatctgaggatttgaatttgtcaatgtcttgcatctttgggtcgttgattagacattaccgaatattcttcagcgattatgatgctttctcatataccgtggatttgagaacatagatgctttcttcattgtactgaaatatatgtagagaggtgtagattattattgctgagtagtattatggggatactctgaaacttcttgtttagaacttactcgagcagtgatgaagatactagtaaggtgcttatactaacttagtaattaaaagaaaattcttaaaattttggatatattgattgttacctgtgatctatactacttcattttatctttaaatcgattttcagtattttaggttcctattctctattcgctttgaatttcttatgttaacataggtacacttgttcttgcatgatttttccttttcatatgagctcacaattttattttatttttcactctttgtgcagcacctgaaaagatggacaaatctagtaccatgcttgttcactatgacaaagggactccagcagttgctaatgagattaaagaagctctcgaaggaaatgatgttgaagctaaagttgatgccatgaagaaggcaattatgcttttgctgaatggtgaaaccattcctcagcttttcattaccattataagatatgtgctgccttctgaagaccacaccatccaaaagcttctgttgctgtacctggagctgattgaaaagacagattcgaaggggaaggtgttgcctgaaatgattttgatatgccagaatcttcgtaataaccttcagcatccgaatgagtacatccgtggagtgacactgaggtttctctgtcggatgaaggagactgaaatagtggaacctttgactccatcagtgttacaaaatctggagcatcgccatccatttgttcgcaggaatgcaattctggcaatcatgtcgatatataaacttccacatggcgaccaactcttcgtggatgcacctgaaatgatcgagaaagttctatcaacagaacaagatccttctgccaagagaaatgcatttctaatgctctttacctgtgccgaagaacgtgcagtgaattatcttctgagcaatgttgacaaggtttcagactggaatgaatcacttcagatggtggtgctggagctgattcgaagtgtgtgtaagactaaaccagcggagaagggaaaatatattaaaattattatttctctgttaagtgctacttcttctgcagttatctatgaatgtgctgggacacttgtttctctctcatctgcccctactgctattcgagctgctgccaacacctactgccaacttcttctttctcagagtgacaacaatgtgaagcttatcttgctcgatcggttgtatgagcttaagacattgcacagagatatcatggttgagctgataatcgatgtgctcagagcactctcaagcccaaaccttgatatccgcaggaagacacttgacattgcccttgacttgattacccatcataatattaatgaagtcgttcaaatgttgaagaaagaagttgtgaagacacagagtggagaacttgagaagaatggagagtacaggcaaatgcttattcaagccatccatgcttgtgcagttaagttccccgaagttgcaagcacagtggtccatcttctgatggatttcctgggagatagcaacgtggcttcagctcttgacgtggttgttttcgttagagagataatagaaacaaatcccaagttgagagtttcaatcatcaccaggttgttggacacgttctatcagatccgtgcaggaaaggtctgcccttgtgcactttggatcattggtgagtattgcctatcactttcagaagttgagagtggcatttcaactattacacaatgccttggcgaattaccattttactctgtttctgaggagtctgagccaactgagacatcaaagaagattcagcctacctcttctgccatggtgtcctctagaaagccagttattcttgctgatggaacttatgctacacaaagcgcagcctctgaaaccacattctcctcgcctacagttgttcaaggatcactgacttctggaaatttgagggcactccttctaactggtgattttttcctcggagctgtggttgcttgcacgttgaccaaacttgttcttaggttggaagaggttcagtcttccaaaactgaagtaaacaagacagtatcacaggctttgctaatcatggtttctattttgcaacttgggcaatctcctgtttctccacaccctattgataatgattcgtatgagcggattatgttgtgcataaaattgctttgccataggaatgttgagatgaaaaagatatggttggaatcctgccgccagagttttgtcaagatgatttctgaaaaacagcttagagagatggaggaactgaaggcaaagacccaaacaactcatgctcaaccggatgatctaattgacttcttccatctaaagagtcggaaggtaatattattattttctaagctttccctcgctttattgtgtgttcttttccttatgattttccttcgcactctgtttagtttttatctgctttctcttacagttcatatccgattttttctccatttttaaagaaagatggcaaaagtatataatggcatgttatgtttatttcttttggtctgtagatgagcttactgatgataaatttctttcagggaatgagtcaacttgagttggaagaccaggtacaagatgacctaaagcgtgcaactggagaattcaccaaggacgagaacgatgctaacaaacttaaccgcattcttcaactcacaggattcagtgacccagtctatgctgaagcatatgtaacggtacaccattatgatattgctcttgaagttacagtaatcaaccgaaccaaggaaacccttcagaacttgtgcttggagttagcaaccatgggtgatctcaaacttgttgagcgtcctcagaactatagtctggcacctgaaagaagcatgcagattaaagcaaacatcaaggtctcgtccacagagacaggagtcatattcgggaacatcgtctatgagacatcaaatgtaatggagcgcaatgttgtggttcttaacgacatacacattgatatcatggactatatctcccctgctgtgtgctcagaggttgctttcagaactatgtgggcagagtttgaatgggaaaacaaggtaatttaccgaaaccttttaaaagtattaccttctttgtttgtttgtttgttagattttggtataaccattgcctgttgtattattcatgtcaggttgctgtgaacaccacaattcaaaacgaaagagaattcctcgaccacattatcaaatccacaaacatgaaatgtctcactgctccgtaagtgtaaattcttctttcatcctgtagaaacgaaaaactcgtcttactaattaatacttctttacttgcagatctgcaatagcaggtgaatgtggattccttgcagcaaacttatatgcaaaaagtgtgtttggtgaggatgctcttgtgaatttgagtattgagaagcaaacggatggaacattgagtggttacataaggataaggagcaagacgcaagggattgctctaagtcttggagacaaaatcaccctcaaacaaaagggtggtagctgaggttagctaatcttttggaaacattttctatctctcaatgcaatccataaatgtttgaatccttaaacttttaattggtctaattttcattaccataacgatgatttctcacaggcttggaatgatagcgtgcaaggtaaaaggtaaaaggtttaggctacgtttctctcttgagcaatttttcgttggttgattctgtttactacatggagagaagagtcgtttaaaggatatgtaaagagtaatttgttattattcttcctaagccggtatattttccggtatggtaccgatggattcttcctcaaccggctgtctttttacagtactagacgattttgttttatttgtaatactttttcttctataatcttgtttatcgaggagactgaactgttgaacgcgttatcaatagtagatttcaaagttacatgggtttgttccattttagactcgtcatttcatatacgatctctacttctgtttttttttttcttgcctttcgtggttctctcttttcgcagaacaaaagtttttcttttcctacttttctttcgtatgtgacgtaggacaacatattggcaagatgctatccaaagtcaagtcttccactacttatcattgtcaacgaaacttcctcatgtattcatattattgtttttagcaacatgttggtttcttcgtcataaattcatattattgtttgttagcgacatgtttttgttttctagtcatatattcacattatagatgtttactaagatagcttaaaatattgtaaaccagagggaatattaaagggacccgaatattaaacatcggactactttcttttctagtccaaaaacaagagcactgatacatttttattcgttaaaatgagaacatagtactcattaaaacaaaaagggatattgcaatgaaaaataaccattggtcacgccatatctaccagcagaaacgtcctaatgatatatatagcatcagatgtgtttcgttggtgcaagaacgaggtgttctttcttgtgcatagcgagtccagtcatgacgtccatctttatatcctctggtttaatccctttaggtagactccagtcaaatttgtagagaaggttagcgaaaggtatctctaccattgcaatcccaagatgcatggccgggcacattctccggcccgacccgaaaggtaggagctcaaaatcttggcccttgaagtccactcctttgtgctcgttcatgaacctctctggaatgaactcattagggttgtctccccacgcggctgtgtcacgagaaaccgcccatgcgttcacctgaatgatggtcttggccggaatatcatagccacctatctttgcgtctgcgatagtttctctgtgtagaagaatggggatgactggttcgagccgaagagactccttgatgactgcctttaggtaagggagattaggtatgtcttcttcagagacatatcctttgtcacctatcacactcctcacttcgtcttgagctttcttcattgcttcagggtacttaataaggtaagtcatggcccataccaccactgcagccgccgtgtcagttcccggcacaacaatatcctgatgaaattacaaacaaaccgagttaataataatattgaggtttaactaacttagagaattgcaataagggttagatatatagagttacgaaccaatatcatggccttgacattttcgtgagtgaatttgatggagaaaggttggtctttgtagatctgcatcaaaagatcaatgaaactctctgtttcttgtttagggcggttagggtcaagagtctcgtctagaagttcttgaaggtaagtgtcaagctccttgaaagctttcttgagacgtgcactgagaccagtgaggttgtcaaggaatccgaaataagggaaaaggtcggagaaaaacagagtgcccaaaagtgcttgcgtctcgtacaagatatctatgaatctcttcatctctgtgccgtactcattgtaccgtttcccaaaagcttgtctacatacgacacagttagtgaaagacaagagaagctcacttagatcaacggtgcctgattgatcagcggctttatagatcttgtccatcatccgttgacactcttcttctctaaccggtctgaaacttgcgacacggttcgggctgaagaggttcaccatacacatcttcctcatctcacggtagtacgcggtgtactgtccgaaaccaagctcacggccttgatacgacatggtttgttgccctttcaagagaggacgagcggtgaagttgaggtcttgagttttgagtagctccttggctagctcggccgaggagatcaccgcgaggcgacggccaccgattttcatcgtgaaaatcgggccgtatagcttggagagacggaaaaggaagtgttgggggttgaatttctccatctggtgaaggtttcctataataggaagaccttttggtcccggaggtaaccggagagatttcttggtcgtgctacggaggaaaaagaaggctgcagccgctactaaaccggctataatcaataagagatccatttttttctgtttgacttacttaagtctttgtgttcggatacttttctactttgaatgatgatgtggtttatatagcaagacaaaaagttttattggttggtttgttttggattttttgacaggtgacagaattttcccttgtttttaaaacgtgatgttagtaggtggactactggtttttggaattaaaaaatgtaacttgggttacacaataatactgaaagcgagatcgatgaagagttgaaaatgtgaagatattggataagaatataacctcttggttttgttttctaaaaatatactatagaacagtaagtatattatgaagtaataaaatatcatcaacttgttttttataaatctcataaacttttgttcatttagacatcattcttgatttttttctttttgaactgatatgatcgatttaaaaacaaagcataaaaaatggtactttagaaaaattcctaaaaatacctatgaaatttgaagcgatcattttctcctatgctataacgtaaactgaaagaaaaaaaaagtatacgtaaccaaaaaactaaactctcagtttttaagttttctaattactctgtagtcaatttttgtagaaaaatatgttcatatttttgcagttgaacagtaggtcacagtgagacaaatattctacttcgtcaatctaagatgaatcgtacataaattcaactcggtagagaaaaaaaaaaaagagtatttcggagaacgagcctaaagatgtccctattgacttcgcagccgctattgaaattactaagccgtcaatattaacgactttgttctcatgcggacattaaaatttatagaaccaatctcatgggcttactaacaaatgttaaggttgacaagaagtgtgacaaaaaaaataaaaagtctacttcgttgagaaaattcaaaatatacaaacagtcaaattaatttattacaattacacgtaaattggtttctgtcaaatcttcctccaacttatttgtcaacgaaactttatctactcttggacaaaagaagaagaatgatcatcgatcatcgatcatcatcatcttgaaaactagttaagctaaaacagctcttagtctgaggaaccataaaatctctatggttcgtcatcttcatcctcttctctttcagcttactagtttcatcatcactgctactatcatcatcatcatcatcatcattgagtttatgatcctcgttgtcagattcttgcaatgcaagcaacggcatagaattagggttaattttagtgtagatgctgaaagaagacaaggacgatcttcttcttagcttattagcaataagcaatcttcttctcttgttcaatggactctccactttcaccaaatcgtttgtgttactcgcttccattaaattcccaaacgatttcgatttccctatgtaatggtttgataatcctctcctgtaacaaaaaccaaaacctaaaccacatgactaaacaaaaacacaacatgtagtaataacatttaaactgagaatctaataagtaagaaacaatttcaacatcttacagattcatcaataaaatcaaacccaagaacataagagaatctaatgatttactttattcttgtaataaaataaatcgatcgaatatattcaggtgtagataacagaataattagaagataattaataaagaaacgtacttaatcggaagagaatcttccaaagatgaactaaacgaattgagccatcttccttgtgatgacgaaacggcgtcgtcttcatcttcctcgttttcgctggtttctccaacggacgacgaactctccggcggaggagatctaccacatctcctcaaaccaatccggctagacagagacgccggtacggcctgatcatgcgtcgtgacgctgctacgatccctaaacgtagaacctaccagaacctccattgattccggtagaattcttgaagcctttgtttatcaaccaaatcgagctcagctgtcataaaatcggagcatccgcgtaggttaagagctccaataagcaagcgcaggttaacaagtaatataaaaaaagaaagagagacaagactccaccgatcggagaagaagaagaagaagataaaaaagaaaagatagttttttttttattaaaacaaaaaaaaagaagataaatagtaatatacgaaaacgtatatatatacgtatgagtgacagtatttttgagtctctctgtgtgtgtactaaaattagtatccgagggaaggacggtaacgtcgactttttgacgatttaacacgttattgctgacgtggcgataatggattggaaattttagcctgacgtttcggggttactgtctccgttaaatccgatgctggccatgtaccgtaagtgttgggtggacaccagaaactctcttcaaccttatccaatactcattactaaaaaggcaaagttatgaattaaaatcagtggaaccagatatgaattgattactgataatctacacggatttaacattatattagctttttctttttcttacaaccgaatttcacttgtcgtaaaagatttaaacacgattattttttgaagtgggaaccaaaatccaaaacttaaactaataattcttatatttatggaagagctgggtagtattctaatcatttagatcatcaaacagtatttaaccataattaacacaaattactagttttgaaaaacaaaggaacagttcaatcatttagatctactcacaggttaacaaacataatttttaaaacatttattatgtttgaaagaaaagagtggtaatatgttgatgttgatcaatattcaattaaagaagtagaaagaaacaagggaacataacttcaacaatttaacgtaatataccagtttctttgacgtttaagaatatcaaaggctgatgatgttctcgatcaaatttcacggtacattatgcaagaaaacaaataaataaaaaagaagttttgctctcaatttcacttccaagctttccttcctctgaactggcttccgctgtggctattcttcattttcttgactcgctttgctttcccagcctttgatcttactgcagcgagaggcatattcttcttgtgttccttctgtctattgctcgatcctccggtctgcgtgttttcatttcacacaattattggatcatcaaacaacacacagcctatatatgcttgtaaataaccatttctcgtaacaacggaaacaaaaacggataccttcttctgcttgatggcagtcttggatttgtatttccctcggtcctccctacccgctttaactaactccagcctttcttcttttattagtttctgccttatgtgagcctgtggaaagagtaagataattcagttaacatcgccaaaacattttgcgactcaaatggagcttctcatactagtaacagcttacttcaagtttggctggattgaccagcttcttacttagcttatcagaatccggaactttcaatccttttcgagccaatgcaagtttcgcatccttctttccctgcatgtgacacaagacatcatcaacaaagttggacttctttaccaaacagaggaaaagagcttctctctttcgcatatatgtatgtataccttaacttctttgatttttcggaagtcctcattggaaagtatgccatctctttctgcaaaagatgtctgttccctctctgcctctgcgcatctctttagtgctcgtaggcttgtatcagcagcgaggagactcgcatcaaaatctactaacttccttttcttcccctttgctttctctctgtttccactaccctccacagaagcttctccttcatcttcttcgttttcccaatcagtctcggcttcatcactgtcattcttctcttcctcttcatctccactaaccaaagtatcatcttcagtgttattcatatcatcaccatcattagaatcttcttcagcctcgtcctcagttatcagctcctgttcgatatcatcactcccaggcaacgccacttcatcatcatcactttcttgcaataaatcaacattgggaacattgctgaagacattgacttctccatactttttaggtctggcaatgggacctccaggacggccacggtcttttttcactagtagcaaagggttgatctgaaattacaataatgtaattactggttaaccacatacactgattattttgttccaattaacaaatcaaatacttctgctacctctctgaacaatgctatgagggaagcagatgctgctgagatggcttttctatgggtacggtactttttatccgttttatactgagcaagatcatgcagcaagtcttctgtcatcaactgaagtatagcagacaaaaaaaaatatagaagaagcaaaaagacaactcagaaaaaaaaaaaaaaaaaaggattggtgctgtaaaactacatttatatgagaatgttaaaccagagttaagaactagttacctcgggaatcctaaggaacatttctcgtaccacattgagtgcgacaggaatagcctggttacatatatgaaaacaatgaattaaaaaggaaaaatataaatgatagaataagctttctagttaagtccctccctaggtgtttgaaatcacacctccggacttgagcgatcgtgtaaaaacttattcactatttgcttgaacagtggctccacggcatccgaaggtacctgctcgatataaaaatgattggaaggattgcaggatgagaaaagggatgatgctttaaagtgtaagatgtttgtataccccatcatggcaagcctgaactgctgctgcaagtatttgtgtaatgtcctttacaccatcctgcatttaagagcatccctgtttcaataaattttcagcaaagaaattgtaaaaagggcagttagcaaatcttaccttagcatacgcttgaagataagtataaaatttgaataaaagcaacttgtgaagaccaattgttcgtgcaataacttttataatcatcaacctggtctgcaaaatttattgaatacatggttagttagctcatatgtttctatagaatggatgaagcgagttaaaatacaattacctcgcgccgttcataagtttccccagtgctcttgtcatcagtttccccactgctcttgtcattagtttccacagtgctctcgtcaggcttaggcctaataaggggaagcaacctctctgcaaaattctgtaaaagaagaaaaacattcaagtacatagccacatagaaaaagctaggaaatgaccactacaaaaaagctaggaaatgaacctgtgcatcatttagatgattaagaggtgaataagttgaagtagtgttctcagacgacgcacgctgctttcgtttaatacttcgcatggcgcgttgcagttttgcttgctttttcttcttgctagaagatgtacctttgttgttggcctaaacatcggaaacaggacctagtattatacttaattcataatgataaaaatgatagtgacaactatatgaaggtggaaaattctattcacaaccagtagtaagcgtcttcgtcatagtctctaacaaaattcatgtataaatatgttgtttaccttgtaaacagcctctctgttaaacacaacctgagatcactatcatcctcatcgttaatgttgtcgtagtcaagaagaaaccgaagggaagatatcctgatcctgaacatgtaaaaaaaaagagaagttagtaattcgaccaaccaaatcatatcgaaatcttgcacagttaggaagatatacctaggtgaagtatgaaagcaggcttcacaaatggcaattgctactctgtcatgtttatcaccaaaccagacttttttcttgtgaagctcacaaagggtaacaagtgctctcttagccttggtttcatcttcttgctacaaccgaagttaaaaatcatctacttgattatacactgatcagttacacaaaaaacccatgaaaagggaaaagaaaaaagaaatacctccaacatagagaaaacaatcttgtgaagagatttgtgccttggatcagtgatactcattttacgaatggtttgaacaatatgagagaaagcaagctttcgcaagtttttatcaccaagagtttgaatatctagaaacagagctaacaaatcctcgatgacaagactctttaacacacaccaaagcaaacatattaaaaaaacattactttcgattacgatcatcttagaattcgtatcaatcacgtaataaataaaaaaacatacctttcgattcataagaagaatcagagattgcgcaacttggtaccgaagccccgacggcattgccaggcatgaggtacggagtaaatcagtcaattgagctggaaaagcggcgagctggttcggataaaacggagtgacatgagcgagaaacatggctcggtctcggagttccttagcaacggaagggccggggccgacggaggagaaagtgagagccgcctgttgctgaaagagatcgacggaggctctgaactgtttgtaaatcaaatggacctccgtttcgtaaccctctggttcacgcttgatttggctctgaaggataggaaggctgagcttctaggagatccggctagaagccttcaaggactccggcgtaagacctagagatccggccataatcggaggttttttcagagagggaaaggaaccaaccaaaccctttaggttttatacaaacacacagacttttgatatatttataggtttagttcttcactgtaccagttcggtttaggatttgattctctcggtttaggattttatttgaaaccattacaaggccaaagcccatacggccagaggcccaatacaaggaaaaaacgcaccaattgaatgaacaaatttatttgatttttgaatgaacaaattaaataatggcttctccttaaaattatctaagctcgcttgaccaatcatggctaccaccaccaatctcagcttcgctcctccctcttactcccgttttgccgctacaaaatcccaaatcagaaaccctctgtttacgtcccccctgccactcccatcttctttcttcctggttagaaatgaagcatctttatcttcgtcaatcacgccagtccaagcttttacagaagaagccgtcgatacttcggatttagcttcttcttcttcaaagcttgtacttgtcgttggcggcactggtggtgtaggtacttaaatgttcaattttgaaattaggactatgaatttctcactattgggtctgctgaatgatggttgttttaaagtcttatcctttttggtatcaggtcaacttgtggtagcttcattgctcaagaggaatataagatcaaggttattactgcgtgatcttgacaaagctaccaagttatttggcaaacaagatgaatattccttgcaggttcggacttaatctcactatttcggatacactacttgttctttttatacgataagtttaaaccatgttgttataggtagttaaaggggatactaggaatgcagaggatcttgatccatccatgtttgaggttcgtcttcttgctcctgttttgtttggcacgagtttcacttgttcttcatttgatttttaactgatttgcctagggtgtcacacatgtgatttgtaccactggaactacagcttttccttctaagaggtggaatgaagaaaacactcctgagaaagtaggtgagaacacatttctttccaattaagaacgttagatgtcttgttttgttatcagttctttcttacatgtcatgatcgattttcctttttgggactatgtgtttttttttgtgttcaaaaagattgggaaggtgtgaagaatctcatttcagcattgccatcatcggtgaagagagttgttttggtttcatcagtaggtgtgaccaagtctaatgagctaccctggaggtgagactagagtatctccgctaatttactttagtctgattgtctctacgtgtagtttatttgctgaatgtatgttttgtttgacagcatcatgaacctttttggagttcttaagtacaagaagatgggggaagattttcttcgtgactctggtcttccattcaccattatcaggtttcgaacaaaagagttacccactttttttgctcttaatactccaaaacgcaggcaacatatggtttactgatttactgtaatgtgatgttttcttaccagacctggtagattgactgatggaccatacacatcttatgatctgaatactttgctcaaagctacagctggtgaaaggcgtgcagttgttattggtcaaggtaaatttgagattctttgatggtcttgcagcactaagatttttgagattactttatttacataatggctccttttaacaggggacaaccttgttggagaggtaagtagacttgtagtggctgaagcttgtatacaggcacttgatattgaattcacacaaggcaaagcttacgagatcaattcagtaaaggtaccacaaacagtttccttgaaatttgaacaaagtggaaatgtagtctgatcaagaaacaatgtcttaaggggtgtcctggagattcaaagctttagttgatcattgaaaatgtttcaaagatttggttgccatttttttatatgtttgagaaatgtggtttcagggggatggtccaggaagtgatccacagcaatggcgagagttgtttaaagctgcagaatccaaatgacaaaagaggacttttgagagatgtgtacagaattgttagcgagacattacatatatggtcgattgtgtatacatgtgctttcttttggtctttgacttcatcattactgtaattactttatctataactagaagttctttcttgcaaatcaacttcatagcaagtgctaagaagtccaaaagagtaagtaggttgcagattggattcttcctagccacttatccgaaattcagattcctgttagattttcgacttctcttgagttgtaaaccaaatagcgacttgagcaataaacaataaagaaagaacagagaaaatggttttgctgaattttcctttattgtcttaaaattaataaaagttacaaatgtagcacaacactaagaacaagaagatttatagggacaatttttctttcgatattataggaatcccacattttataatcctgttcttcagattaatacattaaatagaataatctaaacccgcttggtccctaacatgaagtcttatgaaactaatgagctaaagggacttgaccaatgactaaaagctatacctgattgacagtatttatatacgtgtaacaatacctctgcttccaggagatggagatcataccaatgtggacacattttaatacaacattcgagaacagaacatggcttcaatcagacaactgcagaagtagtacgcctaaggtcaacatcattcttgaatttctcacttggcggtgttcctttgaagcttccatatctcatgggcttaggcatgtaaagagaactgagtatcttctccaaagctaccacagtgtatctcacatacttgcttgaactcgcgtctttctcaaccaatggcccatagttttgcatatagcttctgtaaaccggcacaatagcctgaactatctgctggcaaactctatcccttaaatctttctctggtaagacccatgatgcttgcttcttatacatctcatcaaacgcatcattgaatgctttcaatctcttcttgacaagatcacgagctgtggcatgtccacccgagaaaagtatcagcccttctcggctcaagtggcttggaagcttaccccaactgtctctaaggaagacagtggcgtaatactctttgtactgatcatgttctttcagccacgaatctcctaaatgatccccaatatttgtaccctttaagttcttgtataaatgccagtgattattcataccgaagaaatgcgcaagcgtttgatccggatacgctttcatccatacatccagattctgctcaatggctttgattattcttaaaacctcaaccataagctgattatcttggaacctttctgatctccagctcttatgtatgagcagaacctgagttagtgttgacttgtacttatctccaataagtttattgcagtaatcagttacaaaactgactaatctaggaacaccaccatcgctaggaggcggggtttgtttctgaatctctacctgaaccagaagctcccagaagatttccgctgcaccatcgattatccttttgatgagatcccttgtgaagttttggatctcaatacaggctgctccaccaaagaggcggttgaaatctgctctcagtttgttcaacgacgtaaagatatctaacagcttcagaagcttgattggatctttcttgctatcagtcacagttttcccaaactgaaggaacgcgagcataccggcctgagcagcaatctttgaaaagcaatccatccaaacattcaaaccaagtctctcaaagacatcgttgcaaagcttgaactctgcttcgaacagatgcttaaccgcaaactctaaatgattaccccactgagctatatacccttctatgctctgcacatcgttgaactcagaaaccgagatatctagataatctaagtcaagtgcttgaagactagctctaacattcaagctcctcacttcaacgtatattgaaatgcacttgtcgagtctgttattagctctgagtctcccaagaatggcttgcagtttatgaattacagtaacaggcaactgagacggtgcaatgcaagcctgatcaccgagtgatgatggagacgccattggaagtggtacactgttatccttcaagagcctcctgaactcgttttccagcttatctaaagcagcattcctaagcccgccatcaagacgcaattgagatctctctttctcttctcctcctccacggtcattatgaaattcactaagccctctcaaagatttctttaaattcgaaagatacttctcatcagcgacatggtgatcatcaagatactcaactatatcttccaaccactggatagctaaaccacaattctcccctagaaacttcaaagcttcctctaaccgcttcaacaccgataaataactcgaaagatcgttcttgggatctgataacaaagacttctcaagtccatgaacagcatcgaacaccttaagcacagcagctgcaggaccaacagctcggttaatgttaccaccaacatccttgagagcttctccatcagctcgtatcggcctaaccgcagcttcaagcaacggcaatctctgctcaatctcatcaaacctaggaccagttttacccaaagctaacccaatggcttttgatttctcaagactcaattttaaagactttctagcagctatcaagctctgaatcccacgatccaccccagtagactccgccatcattaaattcaatcaaaataaaaccctagaaaacccagaaaaatctcactccaaggaaagcaagtaatcttccaaactttattcctaataaaaatgatgactttggagattaatcgattcagaatcagatgcaaaacatcaaacactttcctctctctttttttttcgtctcttttattacccttccaactttcaataaatcaaaccaaacccagaaatctagttagcaattacacaaacagaaacaaacaaacccagacacagaaattttcacagctaccaaacaaccaccgaaaaaattgcaagaaccgaaaccagagaattcccagaaagggagtaactttttaactaagacactcaaacgaaagaaatcgagtatagataaggtcttctactttaaagggtcgccggcgaaaagtttatccgacggcgagagtttagcggaagaatcaaaacggtgtgatagtttctctagagagagagagacccagtaaacaaaagaatgatatatcggaaagagaaacttttttgtttttcgacagtttttttttttctcgcgatgcccgacggaaactgacaaagtgcatgacagtgaagcacaaggtttcacagcatcacttgcgacttcggttataaaaaaaaaatcttgctaatatagagtacagatattaatcaaatgttaattacacaacttttaatcactaaaattttgctttttctgtcaacaaaattaattatgttttatttgtgttaaactttaagaattttttttagaaaaatgtgttcaggttccgaatcttttcttcttcctttttctttagctaagattcttttaattagtttcacatatagactagtgaattgtgatcatctaatattaatggtagtttaccaattttaccatattcaactttgtggtaacgtatgagttaggcctgaattaaatcacttggacttcagaacatcaatgacatatttaaaattttatttgcaaaaatcgcaataacttctaacatttatcacagaagttccaacattttctgtattccatgaggaagaggaagtgaatatataatttgtgtgtgaatatggatgatcggtatacttgataatataatagtatagttagtaagctaattttgtttttatcctaaaataatgtgattggcccccagctctaagacttcagattaaaaattaggaaaaacacacataattttacatacaactttgttttagatattgacaaagatattatattagttgactcatttgttatgaatgactaaaaaaatttgttgagtcatctgttatgtatgacttcgcttggaattcaattatgatatcttgctacatgagtaatatataaaagggatgaatatttttcacctctttaatttgtttggcggaaataacgaaagtggtgatctctattgatttacgcgagggttaattataaaatgaacctaaatctaaatgagttacgtttgttttgtctattgcctacatttcgtggcaaatggtaaatttagggatgatcggcgaacaaaattgctagaaaacatgttaacgatactatagaaatagaggtccatgtgcatattctaacgtataacttacaaccaatttgtagatgaaatcaattgacatgtaatagtagactgatcaatgccaactgaatagtacgaggtggaagcacaaagctcactatatacgagactcatcgcttcaattcgttgtcgatcttcgaatttttgatcaacttcatcctctaagccgtaatgagcttctctccacgcaggttcggtccaacgtttgtggatgcaggatgctctatccaatccaaagtaaaacacattagttataagttgtgttatttcgttaataagaacaaattcttaagattgctttgttttttttgcttccaaattttgaccataaatatgaggtccgcgtccaagtcttcttcctcttgcctatgctttgaacatgacttgtctccgtactttcagcagcttgtagttgtctacatacacgtgtagagaaatgggtcgtcgaactcctcgtcgtatggagctgatgccggtacgaagacgtatgccatgtatgggctgacttttaatttgtcgcttctcttcaacgtatggctaagagcagtgttattgtaaggaagaaggatacatcttaagccttggccatttttaaaaaagtgctgtgtatgtgtttggtgatgtatttttgtgatacgtgtgtgtttatactttatagactgaaaaaaaatcttggattgttttttcacatttatactcttgcatgaatgcagctgaaatgacgttgcgttttcttactaagaaacgttatagtgtttgtgaccaatgcaatatttgttccgatcctctcacataaaaaggagtagatacaaacgaattccacgaaccaatatgtgtctgagaatttcaagtgaggagttttgtaccagatgatttaagtgtggtcgtctttgtatactattttttggttggtgggacaagtagtaatggtcttcaaatcttccttcctaactagaaactgaaactttgtccctctaaaaatatacgagtgtttcgtaacttccgttcccttttaacatagcaagtacttgtacatctctaattttgtatacatcgtgccaaactgtttgtcttactaccaatcgatatcgaaatataaacataggaaatggtcaaacacttggtatttcattttaaaacataggtcggcaataacaaatgacaactttgacacaagatatagataataaatgtcaatgtactattcagacggcataaataaattcagttgacccttaacttgtctttcggatttcacatttatatagacaaactcaaatgcattattcgacaccaaaacccaaccaactcattaagtactcattgacttttaatcattcatcaatttagtcaactttactttcgcgagcaatccaacggccaccaagtcatttatattaattaaggaaaaaaacaatgaataatgaaaagtaaatgacgaacataagtctatatcatttggtgcgcaattaatttcataacctctacggttctacctaatacccatatctactaatcatcaacaacaatagtataaaacattgcaccaccactaatttttctctatttaaattgatttcttaataaaaaaatttacaaatttcaatccatctaaagtactcaaaaaatcaaaaaacaaatagtacaaaaaaaagtcaagccgaggcaaacactaaatcattaatgcctgaagaagaaatattctcctgcatcgcggattggttatgacggtgctctccttcgtatgtcacaataagcatcgctggatcatctaatgctcgttccacgtgtttcctcgctggacatcctctgaatgtactgcacttgtagtaaccactggatcgcaaaaaacaaataaacaccgttagatcgcgattaaattaaataccaacggtggatattagacgggtgtaggatatttaccgtgggtgtggtgagcccttgatcggtttttgtccgtacttcctccacgaatattcgtccggtggaatatcggcgatctttgcacttatcgccggtactctcacggttctcttcatccgatttttcctgcttcattaaaaatcaaatagaaaatattaattaacggaaaaaacattgggttccaaaagtcaacggtcaaaacttgagttattcattgagctcaaccggttctagtcattgtcggcgcgcaataccaaaacatgcccgacatttaaagcaactagaccgataaccgggacagtattactaaaccgggttcacctaattgaattattagactattttttaattattgatatagcgagggtaatagtcaactatgggttgaaacttttgaaattaaataactgaagtcactgagtagttgttagagcgacaggtgggtgacgtaacaataccttttcttgcaatggcactttccgtaggcggagccggagacttttccggagaaactctctgagtgctcatgctcgagacatctctttctgtaaggatgaccagccaacggtggttttccggaagagttaacaggctgcaacggagcagaagcaaggaagatttttccattggagacgctgccgtctccggttatcgccgacgacatgaatgaggagtttaaagaaacactgaagttttctttggagaattccagctcggcgctcttagctttggtgccgaagatgcttggtttagagaaatcgagtgttacactagacggtggaggaacgatttgagggtgattcgtagttgttctcactatcggagcctcaggttgagtatttttaacgatctgactctgtagtttctgagatgcggcagaggaagtggagtgaaccggtccgcgtctgaaccgagcgtgaccagtacggttaaggagagaaatgacggttttgaatttagaaacggtgaagtcagtgatctcggagcagtcaacgttgtgttgttgttcgggacggttagagaggacacggatcagatgttccatactttgtaaaccttgcgatgcagcttcctgaatagccgtttgatcatctatcttagggaaacgcattagatcgacggccatgatgatttcttggtctgaggattttggagaggaacgttgaagaagaagaagacgaagacgagagagagaaatggttgtgatggagaagagagaagaagaaggatgcgtgatatatggggaaaagaggaggtgaccgggtcagatttttggtgattttttagtcaaaccgggaaggaggttttgatccaacggctgtgattgagttgaggatttccacggaataaagcaatcaacagtttggtctcctcaaagttcgaggttactgggacccacccctggcatccgaattttatcgttacttcaaattcaagatatttttcaacccaaaaagataatggatggacagaattttctctaaataacaacactcttaacaaaaatcattcaacttagcttaagcaaaaggtgtagaaagaagtttgcatgaccaaagtaagtaaaaataatgtcaatgattcattcacacacaatggagaaagagggccagctggaatttggttgaggcaagagaaggaagagttgtcaacgagagacagagatgattgattaatcccaaaataataataatggatacatttgacttttataaagctttaattatatattatgtttgtcccaatttgaatcttctgtattctttcaaattctacggactttaatatttgtcaactagatttacgattaactaattcaagactaagttaaggggtttccataaccaataaatatttggcgccggacttttacttcttttttgtctttttctattgataaaatttgactgtttacttatttacaacaagaagttttcattttagaaacagtcttcacttggaaactttattaacctcaaattcacctaagtattctacacatattgtgaaaacaacaaataataatagtcattataattaaaatagcagtaatggtttgactaatgattttaaaagtccactagaacagcgattcatcaatacgacaaaggaaggtgaaaagctgactatttaaaatgttaaagtagtagtgctactaaattattgtaagaaaataaaaaataacgaatttacgattatttctttgaacataaagctatttgacgacctcggtaaccgggtggtcccattaactcttatatgaaccactggattttcgaaaggtcaatccaacggtggatctgtggatacaagtgttgactatgtttttatgattttatgagcctattaaaatctccagccagctattaagttcttgtcacgtgtcgacttttgttatcatgttccactattgaaattgtttcaaaaatgaatggaacagaaattaggcaaggcataaaattgagaaaaagggaaaaaaaatttatttagtgttttgatgaattatttttgtttgtagaatttttattaacgaatgattgaaaaataaaaaatatcggaaattgtatatagtgacataaaatgtactcgtatgtatcaacattatcttggatactagtccattggttacaaaaataaaatcttccaacttggattttaatcgtattcagtaattgtgattatcttagctggcaataattatattgtctctctatgttttggaaattaatctggacttcagcttaaaattcttaaattattaacaaaataaaaaatgaaaatagaacgtgttgagtgttcatgtaacgtgttttatggctatatatgggtggggaagaaaccatggattgttgttatttaaaacagtttcttatgtcaacgattaaattataacatggggtagttgacccgatcgaccgagttgtattattattgtcgtgcacgtctatattatctacatagttacaaaatctcaatgatcatccttttttctatgtctcaatcactcattgtgttataatatttctgagcatctctttttcttcccgatcaatatttgtttggttaacattagaataagataacaaatatatatttgtaagagaaaaaactaacatgtcaatgcggttttggaactagtctttcactaattttaaaagtaaacttgtttttgttctatacatgcggggtaaaatcgttccccgtattaaaactacaatgaaacataaaacaagataaaaaaaagtaagatgatttttagaaaactaaaaataaaataataaaattatgctcgtttttctctggttgtatttcgttccaataatttatattattattttctatcaagcaggtgcaagaaacgtgttcgttaaattgcatgttgatataaaaaaaaaattaaaaaaaaattgcatgttaattctatctctacgactctgcaacgttacgtactatttattttgtcgtattaataattgagtatattttgtacttcatgacaagaagttacataacaatttaacggataaaaaatattaattcaaataatcttgacataacaattatgttatttttttttaacaacaactcaaacaagttctttaaacaacaaatgttctgatcacaaatctcttttttttttttttttgtcaaggatgattataaatcttaaaattagaaataactacagagtttatatacagagaaatatgggatgataaaaaagactaatatttgtagtcctattagttttgtttcataagtcttaatctcacttcagttacagttaatacatgcatgatcaattctactatatatgcatatataatgcatgcatgttgtagagttgagggttatgacacaatgctatgcctattttacttgtactaattaaataaacattgaaagaaagctgtaaggaagaatatgtagataaaagacaaaaagtaaaatgagagtggaatccaatgtggacttcaactagatgtcatattttgtatttttctaatatcaatgtttaacgcatatttggatgtaacgttgggtgtcgaataattttgctttatattcttcactttaacgtctaaacatgaaccaagcacatggtggtcttggaagatgaactataaatatcaagaaaatgatgtataatgggtgatccaaaccaaagcacatataatctctagagttaaagtgggtcgaataatctctagagtttgtggaacgcatagtatctttgccatttaacgtacgtacgtatctagaaccaataatgataaaaactgtagtggattaattactcgaaactcaaaagtcttattcccaacatcaagataagtggtaaattttaatactggaataaaccattatcccacgaaagagaatattataaagtttatatattggttgactttgtgttaaataatgatgggattatattaagaaaaacttgttaaatgaatatcagaatcaataatcgtatcaattagacaacttgattaagatttgattctggtcagtaaaatatatgaaacatgctccatatgctatcatatcttcaataaaataaacgaattgaagacgagtatatcgctatcatggcaggttccaattagttatctccatcctcttttttgtttccacaaaggagccactttgtgttctttatttttgaaaatgtttgattggttaattaaccaagtgaagttgtaatactattatgcaagaattaattgcagcactctatgggtttcgtaatttggttaatagtttaatgggcctcgtacaagtcagcccattggatatatttcagattaatcgggtcgggtcacaaatgattatccttgttgccttgcctttgccaatcgtttgtttccaaaataaaaatcatggcgagacttttcgtctctatccctatgcaacccacacaaataagcttccctgcgtcttcttctcagccactattatctccgccggcgaacaatttcaccgatggtggagctgggggattatgtcttacacggagaatcagagacagttccgtggtgacgcgagcagggcctagtacgagcagctacttgctcgcgttcgccattcctgctactcttatcgccgccactgtcttcacttcaatcaaaatcgctgacaaactcgacgaagatttccttgaggatgtaagatccttcaatcttcgtcatatctaattcagattcgatttttgtctagctctctagtgttttaccttgctttaggtctagtttgtctcagtcttagtttaggtaatcgtggttaagcaaattttatttgggggaaacaattaagcaaatgactaacttttgaattttgggttgaattggttcaagttgttgaattaacggcatcgttagaaagtaagagataatcacatcctctaagagcgcattgcaatctaatagaattgaatctatctctttctggaaggagctcattcttatatccttgaggtggaatggatagaaacagtgttattgtatcatctataaggtctgtaaaactaactgctttgtactattatttttctgcttctgtagattgcgttgaaccaagcgataaaagcagcagaaaagggagagaatggagaaggtgatatctcactggacgatgtgattcaagaacctgtgcttcaacgaacacgtaaccggcctaaacgtgaagtttaaaaacgcacacacagcttcttcatgatgggaatagacgttgtaactgtaatacatgttgtgttttgtataagaaaatttaagcgtgtagcctttcctagtcccgtttatagttgtagttactggttttacattaccgtttgatcattttgtaaagaaaaaacggatgatgaatcaaaaacctcattacagttaccattttaagttgagagcagattattttattgtggccgagctttcttctgctgtaaatttgtaattttggaagaaatagaaggacatcttttgtatgcttccattgaccaaatactgtttcgtgtaatcgtctaatccgttttagattgggcttttaaggcccagtatgagttgtctctttacttttgaagtagtagtgtttaggaattcttctcttcgcttcaaatcgacgtctgtgtgaggttaaatcgcgtcgcgttttcatctagcagttttttttggttcaaacgaacgagacacaccagctaaaggccatttgcgttagatctaaggagagagcgacgtatacgtggtttcaagcaaattctccacgggaaggagattaacgagcaaagtcgatttcagtctcctttgtggagttttctcttcaacgcatcgagggtatggtttagctcagtttcgtgatttctagcgtgttattcatcgagttcctgtgtgtaatttgatgatctccaattgtggttattggaaacgagtttggatttagcttctgatgggtttgtttttcaattgaatctggagattgattttcgtttagctgctgcacaatttgggtctgtttttttacaaaatttaaagccacacaagctttttatttgtcttgttcataattctaagccactatatttgtgtcggtatcatataagttttgtgaaatttagctcagttttctttgttgtgattggattctgcgtcaatcaggtggcacgaaccatggttatctaaacttggtggtgatccacgaagagtcattgtgggaacaagaacacagtgaatcgaatggacaagaaaaagaaccgtgctgatccgcttgctgctgggcgccagaaggttagcttcgttgtccttaaacctacctctttggaatttgggtaaagttgcttagttatcacaaatgtcagtgagaagagagagagagagagagagagagagagttttacccaacttgtctctacttgattacttgtcctgcctagatttatatatatatagatagagaaacattggatgaaaatgttttaatcgcttagtttcgtatcctcatttcagcttcaacaatttcgtcaaaagaaggctgacaaaggcactgatcagaaaaaggactccaaaggcagtacaagccaaggcaaatcctccaaaaaatctaataaatctgagaagcatgagcgtaaacctgacactagtgctgtcagtgacgaggcacaagctccatcccctgtgactgtaggaggagctacatctcatgtgaatgttgctgaggaggttgtcgattctccacaaacttcttcagatacaaaagctcacgaatatgtttcagtccatggttcctcatcagagcctgatgcgcttcagccaggacacaccacttctaatgatggatctgaagcgagaaaagaagtagttaattctgaaaatgatatcagtaaatctttatccactgaagaagagaatgtgaagtctatcaacagtggagtggctggcacagtggattctttgatatctgaccctgcagattctgagaagggagttacacatgacgatgcatctaatgttgatggaatctttgctgcttctggaaacatagcggagggggaaggtgttgaagttgaaggtggttctgggaatgtggaaaagccgcatcagccatcctctctccaagaatatattcctgatgtttccttgattcgtgcaaggggagatcaggtaactgatgtaggttgttctctccttctcttcatgcttctctcttcaatcattttctttattaccttttctctgataagggtaaagaggttatgtctattgcatgcgaccttttgatgtataattaagttctcatttgtttctgggtaggggaaatgcaggaagaagacatggagcagttttctgaattatctgcaaaggcaggcgtggataagattgcaactgaagaaaggcaaacaagctatccagctgttgtggattcatctgcttctccttcacacttttcagagggatcctcagttgcctttgatacagttgaactagaaggtataaatggtaattttagaagccaacagattagagaagctgcagagcttaacgaagagaaaccagaaacatctattgattttcctaataacagagatcacgtgctttcagctgaacctgaggaaagctctgttgcagaaatggccagtcagctgcaattgcctgagagcgtcagtatatctggagttttgagccacgaggaaactcgtaaaattgacacattgaatttatctgcagaacttacctctgctcatgttcatgaaggccgctcagtcagcttcttacagcttatggatattgtaaaaggacttggccaagatgaatatcaaattttgtgcaacgcaagagaggctgcttctagtactgagccaggaacaagttcgttggagcgactaagagaagaactgtttgtttcgagtaccatggaagatatactccatgtgcaactcacagaacagtctcatctacaaatagagtttgatcatcaacataaccaatttgtagctgaaatatcacagcttcgtgcatcatatagtgcggtgacagagagaaatgattctcttgcggaggaactatcagagtgccagtctaaactctatgctgctacaagctcaaacacgaaccttgaaaatcagcttcttgctacagaagcacaagtggaggatttcactgctaagatgaatgagttgcagcttagcctagaaaagtccctgttggatctatctgagacaaaagaaaaattcattaatcttcaggtagagaatgatacgttggttgcagttatatcttccatgaatgatgagaaaaaggaacttattgaagaaaaagaatccaagaactatgagattaagcatctttcatctgagttatgcaattgcaagaacctggcggccatactaaaggcagaagttgagcaatttgaaaacactattggtccattaacagatgagaagatacatcttgtggaggaaaaatatagtttattgggtgaggccgaaaagttacaggaagaattggcaaattgtaagaccgtggtcaccctgcaagaggtggaaaactcaaacatgaaggagacgctttctttactgacacgccagcagactatgtttgaagagaacaacatacatctcagagaagaaaatgagaaagcacatctagaactgagtgcacatctgatctcggagacttatttattatccgagtattccaatctaaaggagggatatactttgttaaataataagctcttgaagtttcaaggggaaaaggaacatttggttgaggaaaatgataaacttacacaggaacttcttactcttcaagagcacatgtcaactgtagaagaagagcggactcatctagaagttgagttaagagaagcaatagcgcgccttgataaattggctgaagaaaatacatctttaactagcagcatcatggtagaaaaagcaagaatggtagacaatggtagcgcagatgtgtcagggttgatcaatcaggaaatttctgagaaacttggtagaagttcggaaatcggggttagtaaacagagtgcatcttttcttgaaaatacgcaatatacaaatttggaagaggttagggaatatacttctgagttttctgccttgatgaagaatctggagaagggggagaaaatggttcagaaccttgaagaggcaattaagcagatcctgaccgattcttcagtgagtaaatctagcgataaaggtgccacgccagcagtatcaaaactgattcaagcttttgagtcaaaacggaaaccagaagaacctgaatctgagaatgcacagttaactgatgatctgtcagaagcagatcaatttgtttctgttaatgtgcagattagaaatttgagaggtttgcttgatcagttactgttgaatgctaggaaggctggcatacaattcaaccagttaaatgatgacaggacatcgacaaatcaaagactcgaggagttaaatgttgagtttgcatcacatcaggaccacattaatgttctggaggcagatactattgagagtaaggtttcgttcgaagctctgaagcattattcgtatgagctgcaacataaaaaccatgatcttgaacttctctgtgattcattaaagctaagaaatgataatatcagtgtagaaaacacggagctcaataagaagctgaattattgctcattgagaattgatgagcttgaaattcagctggaaaacttacagcagaatttaactagctttttgtccacaatggaagaacagttagtggccttgcaggatgaatctgagcgggcaatgatggtagaacatgaattgacatcattgatgtctgaatttggtgaagcagttgtgaggcttgatgattgtttactcagatctggcacttctggagctcatactggcttagatatgaccaaacgcatatctggttctgttgatgtggctgtaaacgtgattgaagacctcaaggaaaaactagaagcagcttatgtgaagcatgagtccacctcaaacaaatatgaggaattgaagcagagtttcaatactctgtttgagaagaatgaatttacagcttcttcaatgcagaaggtctatgctgatctgacgaaattgattactgaatcatgtgggtcagcggagatgaccagtcttgaagttgaaaatgtagctgtctttgatcctttcagagatggtagttttgagaatctgttggaggctgtgcgaaaaattctttctgagaggcttgaacttcagtctgtgattgataagctacagtcagacttgtcgagtaaatcaaacgatatggaggaaatgacgcagcgaagccttgattccacttcacttcgagagttagttgagaaggttgagggtcttctggaacttgaaagtggagtgatttttgaatctcctagttcacaggtggagtttctcgtttcccaacttgttcagaagtttatagagattgaggaattagctaatctcctcagaaaacagttagaggccaaggggaatgagttgatggagatcgaggagagtttactgcaccataagactaaaatagctggtctcagggaaagtttaacccaggctgaggagtcccttgtggctgtacgatctgagttacaagataaatctaatgaacttgaacaatcagagcagaggttattatcgactcgagagaagcttagcatagctgttactaaaggaaaaggtttgattgttcagcgtgacaatgtcaagcagtcgttggccgaagcctctgctaaactgcagaagtgctcagaagaattgaattcgaaggacgctaggcttgtagaagttgaaaaaaaactgaagacctatattgaggcaggtgaacgtgtggaagcattagaatctgagctgtcatacatccgaaactcagctactgcattgcgagaatcgtttcttctgaaagactctctgcttcatagaattgaagaaattttggaagatttggatctcccagagcattttcatgcccgagatatattggaaaaggtggagtggttagcaagatcagctaacggcaactcttcgcgcccctctggttgggatcagaagagttctgatggaggtgcgggatttgttctctcagagccctggagggaggatgtacaaactggcacaagttctgaggatgacttgaggatcaagtttgaggagctcaaaggaaagttttatggattggctgaacagaatgaaatgctggagcagtccttgatggaaaggaatactttggttcagagatgggaaaaactcctggaaaatattgatatccctccacagctacactccatggaagtggaaaacaagattgaatggcttgcaagtacaattacagaggctacacatgaccgggataatctccaacagaagattgataaccttgaagtctattgtcaatcagtaactactgatttggaagtctcacaaaagcaagtaggtgatgtcgagggaaatcttcaatcatgtgttagtgagagggtgaatctttctgaaaggctggaaagtttgattggtgatcatgagagtctttctgcaaggggcattcaccttgaagttgagaatgagaaactgcagaatcaagtgaaagatttgcatgaaaaattggttgagaaacttgggaatgaagaacattttcagactattgaaggagacttgttaagtttgaggtacatgattgatgatgttatacaggaagatggcttgcaagatttggctttagcaagtaattctgagaacttggatggagtgctgagaaagctgatagactattataagaatttggtgaaatctagtttgccaggtgaaaccgatgacaacgtctgtgaaactcgtccatcagatgctgatgttagaagcggagagtcattgggtgcacatggagcaacttctcatgggcaacattttgaattgtctgattctaatgtagttgaagcaacaagtagagacatagcagtcgtagagacacctgatgtagcttccctaacaaaagatctggatcaggcactgcatgttcaaaagctgacaagggaagaaagagatttgtacatggcaaaacaacaatccttggttgcggaaaatgaggcacttgataagaaaataatagaactgcaggagtttcttaaacaagaagagcagaagtcagcttctgtaagggagaagttaaatgtagctgttaggaaagggaaggctttggtccagcaaagggatagcctgaagcaaactattgaagaggtgaacgctgagcttggtcgcctgaaatcagagattatcaaaagagatgaaaagctcttggaaaatgaaaagaaatttagggagttggaatcttattctgtgagggtagaatccctagagtctgagtgccaattgttgaaaattcattcgcaagaaacagaatatcttttacaggaaagaagtggtaatttgagcatgacgttgaatgcgttaaatagcattgatattggtgatgaaggtgacataaatgatccagtcatgaagcttcaacgaatctcccaactgtttcaaacaatgagtacaaccgtgacttctgctgagcaggagtcgagaaaatctagaagagcagctgagttgctacttgctgagttgaacgaagttcaggagacaaacgatagtctgcaagaggatctatcaaaatttacatatgaaatccagcaactttccagagagaaggatgcagcggaggctgcaaaggttgaagccatatctcgttttgaaaatttatcagcagtcagcaacgaagaaaagaataagctatatgctcaactgctatcatgtggaaccagtgtgaactctctaaggaaaatactcgcaggtaccaacagttgcctagctgatattttcatcatggatatggagtttctgcatcatctgaaggcaaatatggaattatgtgcgaagaaaactggaactgatttgtctggcttgcctcaactcagtacagagaatctggtagacaaggtatttaaataattttaacagcttattatggtatatatactttcaaggtttttctgcctctgactattttctgaatattgtttttcctatttctgcgtaggaaatctttgcacgcttgagtgctgcttggtctaacattaacttgcatgagacatcaagtggtggaaacatagccgaaatttgtggttctctctcccaaaaccttgatcaatttgtggttggtgttagccatctcgaagagaaagtaagcaagcacttggccacatggcacgaccagatcaatattgtatccaacagtatcgacacctttttcaagtcaattggaacaggaacggactctgaagttgccgctcttggtgaaagaattgccttgcttcatggagcatgttctagcgtgttggtggaaattgaaaggcgtaaagctgaacttgttggaaatgacgattttaatatgagtctccaccaagtagatgaggacttttcgtctatggaatctgtcaggtccatggtaaataggctatcgtcagctgttaaggagcttgttgtagcgaacgctgagactctggagagaaatgaaaaggagatgaaggtaatcatcgccaatttgcaaagggagttacacgaaaaggacatccaaaataataggacgtgcaatgaacttgtgggtcaagttaaggaagcccaggctggtgcaaaaatctttgcggaagatcttcaatctgcaagtgcccggatgcgtgatatgcaagaccagctgggtattttggttcgggaacgggattctatgaaggagagagtaaaagagctgctagcagggcaggcgtcacactcagaattacaggagaaggtcacatctcttagtgatctactagctgcgaaagacctaggtcagtttttctcttttacccttttgtttttgcaccgccacatatatagctgatacctaattgcttcctgcagaaattgaggccttaatgcaagcgcttgacgaggaagagtctcagatggaggatctgaaactcagagttacagaattagaacaggaagtgcaacagaagaacctagacttgcagaaagctgaagcttctcgtgggaagatttccaaaaagctatcaattactgtggataaattcgatgagctccatcacctctctgaaaatcttcttgctgaaatcgagaaacttcaacagcaagtgcaagatcgggatacagaggtttctttcttaagacaagaagtcactaggtgcaccaatgaggctcttgctgcttctcagatgggcactaagagagattcagaagagatccaaactgtactgtcttggttcgacacgatagcttcactacttggtatagaagattcgctgtccactgatgctgacagtcatataaaccactacatggagacatttgagaaaaggatagcgtctatgctatctgaaatagacgaattacggttggttggacaaagcaaggacgttttgcttgaaggcgagaggagtagagtggctgagctcagacagaaagaagcaactcttgagaaattcttacttgagaaagaatcccaacaagacatttcaacaagctcgacgtcagagatcgttgaagtggaacctctggtaagctttgagcttgttaaatagttacaccattccagatgcctcaagatgataaatttttaattgtggatttttttttgttggatatcacagataaacaagtggacaaaaacatcgattccatcacaagtccggagtttgcgtaagggaaatatggatcaagtcgccattagtatagatgcagatcaaactgatcaaagcggtagcttagaagaagatgatgataaaggtaattaaacttgtctctgaatatttagtacttttaacaacatttcttagtaacattcccatttgtattttttctgttttttagctcatggtttcagatcactctctacgtcaagaatcattcctagattcacaagacccatcactaacatggtcgatggtttatggtcagactcttttcatccatggatctcgttcagtgtaaagttctttaattatgatctaacaaaaaacgacccttttatttggtttctgaacttttcagggtctcttgtgatcggacgctcatgagacaacctgctttacggttagggatcatgctatactgggcgatattgcatgctcttttggctgctttcgtggtctaaccaaacttccaatttcgtaagctcattactgacttttttttttttaatcccaaaacaagttgcaaagagtagcttgatttgctaagcttttaagacgtgttttaatcgtatatttgcagctggtttctcgttatagcatgcatgggctcatcaaagtggtgatgtgttgtcgtctccaacactaattttttttttttttttttttttttttttttgtctttgtctttgtttttaattcattgtttagcttatattaaccaagcaaactgtggtttcagcatttttattgatccgaatcacaaactgcttgggttttcaaacgaataagaaagaaagtttatttagtagctgtggaatgaaagtgtgatttaactagagagacttgaagttctattatttttctttttccctattctgctattcattattttcagaaatacaaagcaaaatacgtgaaatgatcacatttaagtatttaacaaactatacagagaaaaaataaatatcaccgacactaacatattattgaaaaaaggcatgaaaaggctacttttaagcccaataaataggcccaaattgtatatttactaaattttgttaacgcgcttacaaaaccctttggaaagtatttcatcaaatttcagattcagaaaccctaatttcttcacaaagcaaaacacagaaaaagccattctttttgccccttgagtgctttcagctcttcccacaaggtaggtcgcaaccaagtttctttatctccttctcactcttaattgtggtaacgttgatccgatctgttcaaatttgatcgggtcacttggtggatctagtgactctgtattttttctcgatgaattcaaatcctttcgaatgtcttactagaaaagatttagaattcctttatgttgaccttggtttattgtgccattgacaggttacagaagtaatgtcacgtgtgtacgtcggaaatttggacccgcgagttactgagcgtgaacttgaggatgagttccgtgcctttggagttgtcaggaggtaagaatcaatccaatcaatcagttcgcgctacaattttgtcacttttgaagttaaaagtatccaattttgcatctctctaatgttcatatgtaatgtgcagtgtttgggttgcccgtagaccacctggttacgcttttctagatttcgaagatcctagggatgcccgtgatgctatccgtgctttagatggtaatgatgcattcatattctttctattttgctttgttctcttagaagttgatgttttgattgggattggaaaataagtttggtggaatcttttaaaggagagaaatttgaggtttgcaattacttttgacttgaaacttcacaatttgacatggatattgtgataacggataggcaagaatggctggagggttgaacagtctcacaatcgaggtgagcgtggtggcggcggtcgtggtggtgaccgtggaggtggtggcggcggccgtggtggtcgtggtggctctgatttgaaatgctatgaatgcggtgagactggtcatttcgcacgtgaatgccgtaaccgtggtggaactggaaggcgtcgcagcaagagccgtagtcgcactcctccaagatacagaaggagcccaagctatggacggaggtcagtgatgctttttattttgttaccttagtaccttattttgaacggattaagtaaccttgcctttttctggttttaggagttacagccctcgtgcaagatctccccctcctccaaggcgccgcagtccttctcctcctcctgcccgtggccgcagctacagtagatcaccacctccatacagagcgcgtgaggaagtgccatatgctaatgggtaaatttctttttcccaagtctctatatcattatcagtgtttaggttttggttatagttcttagagataaacatttacattttcttcagatgctaattcaacatctgttcttgtttcttcagaaatggactgaaagaaagacgcagaagcaggagctgagtgagtgattttgcaagaaaacgagtgtgtgggaggatactttggaagagaagaagagagggactaagggaagttactatcatctatgaatttcagtaagagaacatgttttaggtctgctgggttggataaagcttgctacttttgcttttggatatgaaacgtacgtagttgtgtatctaccaataggtaaaagaacacttgattcgtaccctagtttcttaaagacataatgtttgattggaaattctgctaaatgcctaagcgtttcttgtctttttccaccgtgtcgaggtttcttcgggtctactactactactactgcttcattgcttatctacttgcttctctactcttctcatatgaagcatcttccttagtttcttggcctacttcattgtttatctgcttgcttctctactcttctgctatgaatcatctgcatttagttgctcggcctggtatgggaaaagttaaaccacggttgtggatccctaacatcatcttcatttagttgctcggcctgcttcattgtttatctacttgcttctctactcttctgctatgaatcatcttcgtttagttactcggcctgctatgggaaaagttaactacggttgtggatccctacatggcttgcttctacttcatcttcgaccctagagatgcgctattgtttgaaaacttcatcagctttgaggttaccttctttgcatgaacttgagctgcatcactcagaagcacctcttgtgtggtctgaatgttgtgcattaggtttagcataattgtagctatgtgatagtgtttagtatgcacattcttgtccttggatagatttttgtgcatttcacggtttatataggcaagtcaagaatttgtaaatgcgtatcagttgctaccatttggtacttgtgttcatttcacttaagcatagttgtgaaattgttcacttttatgaaggtgaagcaaagtaattgcctaagaggaagattgaatacataatctgatttgctcttattcacgtaacaactagctatggtttcgtttcagcaactataaatcccaaattaagtgaaaaaataaaagtatacttgcgaagtagacatggagacgttgttttggcatgacaacaattaaaagcctagaaaagcaagagagacaagatcatgatcctagttcggtcccagaatcatcaacaaacccaccaaattaaaatctgtttggtcccattcttcacttacacatcattgaattgattgttatgtgacgtaaacctctctgacctctgctttttttctgcaattatgcttctcctcattccacttcctctgccgacactttttttgctccacgtttcttcacttttcaccgacactaagttgagaatgtcctaagatcctcagagaatacaataaatattggtctttctcttgtttcagtttagtcagaaaactggttcttgttagttatttacagttacaatctctttccacaaaggttggactttaaattacataaattctctgcagtgatttgacatgatccttgaaattagttcaagacagaagctcttttaactgccaacaacatgttccaactttacagatattgtatacatgtatgaatctctggctcacactctatccctaacaatggaggaatcaaaccaacataacaaacaaacaaacgaaacggaaaatcaattaatgcctaccactatggttccaacaatctcattacagaggataccactgaacatagaggaagtggaaattcaaactcactgatttattgacccgagttatgaatcttcttttgttcttctcagctcatctgctcgcctatgagatcgagacccacaagaagaaaggtaacaccttggaataacaggaagtagaaatgcactccttgtgctgccaagagactcctaagcgctgcagtgagcaaaagaaaggccaatgcgagctctttgtggtatatcttgttggttttcttgacaggtttctttgaaaccgcttgtttctgttcttcaagttggctcagctccaaaagttcgctgtcggaaactcccctaagcaattgacttttcttggttggtgtctctttctcggtgatagataaaagatctgactctgatgatcttccagctttctttgtgacaatccactcgtaagagctacccaattggaataatccggacaccatcgcattgaacttggtgacagacattgtgttctcgaataagagataaggaacgatgaaaggaaacgattttggagatggaagaaggttgaggaaagacatgaaaactggtatgtagcagatgacccaaacagggagctcagcttctggaacaaacatggtgagtggaaggattatgcagaacaaagtgaaggagtagaaaggaagtatgagtttcctaagaagaaagaagagaagtatcagattcgccttcttccatatcgctatctgcaagagtaaccaatgagaaccagaagaagtcattaacatgatgattagcaaacatttgaactaaaagaagaaaaaagctgcacactaccttagaggtcaagattgaaccaagacacaagcggaaaagctgcataggtcccgaatgccaacggtgttgctgcttcttatatgcctcgtaggactcaggaacttcgcaaaggacctatagatttgtttctatccagtttaattcattttgttacataaataaggctttttttagaaacaatcgataaaaagtagtaccttgacgtcattaagatatatgaacttccatccatgaagatgagcgcggactgctatgtccatatcctccacagtagtcctttcaagccaaccaccagattcctcaagggctttgattctccatactccagctgttccattgaaaccaaagaagttcaagaacacgccgttcacttgctgctccacctcaaagtgaaaacacagattgatgttctgaagacgggtcaacaagttctcgtctttgttcacaaatgtccatctagcttgaactagacctaactctgggttatcctgaagattaaatcacatttttaacatgttagcaatctctctctccacttttcaatgatagaaaattgaaaccaatgttaataccaaccttgaaatgtggaactgttagtttaaggaaatccggagtaggctggaaatcggcatcaaagattgcgacatactcgtatgcttcaacgtaatcacagctcattgctgatttgaggttaccagctttatatccagttctaaccaagcgatgcctgtagattatgttgactcccttttggctccatttggcaacctcagctttaattaactgttggatgctttcatcattcgaatcatcgagaacctgaaccagtattcgatctttcggccagtcaagttgacacacggcagatatagattgttcatacacctgaacaagaagaagactaaagctcattacactgataccaaaaaggttatataaagcaggagaaagatgaatactttcttggatataccaaagttgaatgagcatacctctctctcattgcacattggaatctgaacaagaaccattggatactcagatccagatccctcagcatcatcattacggaaaggttcctcatcaaatctcggcttaattttcttatacttgatccaaaaacaacccaagcaaagtaccaaacgatctactgactgtataaggaacagcacaatacaaaacttggagagagctttgatgggaggagcaatataatcagctctaagggttaaccaaccaacatacacaagatgaaacaggctctggatctcaagtgtgctagtggggatgtgaagactagggctttgaaagtaatgccatcctctaaaataagcaacaatctcaaagccgagaatcactaaggaaacagctaagaagagcttaatggcagtgaaaagccatctgtctctgcctaatttctcagagccaagtgggtgagtgaaactaagccgtttcttgatggcaccaaggagagaccaaaagacagtggcgagccaagtgagacatccaacagctctatgagctttgagaagcaaaacccaagtgacttgcttagcgttcttgcctctgctcttctccactggtctaaaagccgaatctggaccgtcgatttcaactacagagtaattaggattctccattttcaccacaactggtgttcctttcctcgtgtctttcgcccaccaatctgaaaaatccaaccttggagccatcttttgcctctaaaatctcctctgagaagtagagaaatcgaaaaccctagctgaaatttctaaatgtggtaagaaggatcccaaaataaacacccaaatctcaaagtgtgagatttcaaacacaacccattttcaggaaaacaaaaaggtagaaactttgagtgaaaggagtgagctttctctactaataatggaagagaaagagattaatctaacacccagatcccagaaatctgaaatctagagacccattttgttttttattatattctaaaaaaccagacaaagaagcatccacagctcaaggctcatttatagtggacctctttttttagagaatgacagagagaaggatgggttggtgagagagtgtagtgactcagagagagaagcaaaggcagaggaagaggaagaaaggtatcatcagtgagagaagttgtaaaagatgtgtcacttgcactttcatgtgtgtgttactctttcagctacttatttgattgcttcagcatgcaaaattcatcccctttttattatcactctttgtaatctttcacaagcacttgtcatgtcatggatcttcattacaaatatttgtattttcttaaaaaaaacaaatttgttatatattcaaaagaaagaaaattgaggaaaatccattgatggatggggaccatatgggttgtttggcaatttgaggtgaagacaaattcaaatttgtatttgtgaccaactatgtactagttacattggaacatgtttataagaaaagatactaccaaatcggtttcaagtgaatcactctattttgctatcaccgcttctcctacgtgctccccatgtcatgttccatgttttttccaaattatatattttatacatttagtcaaattctctttgtagtccattcatatttgttaaaaatactatattaacatgagttaaaagttttcctgattaatttactcaaagcataagcattttcattattatattcttgtcaaaaaaaaatcttgagtgttgatcatacttggtaattggtataatcacaaacgtaagtcaaagccttactgttaaaacaaagggatgcaactcaatattaactatgagttctataatcaaaatatatattatacattaggagagtaaggagggaaacattatactttggtttattgacaaagtgctctctaacaatcaaaattggtcaagtgttgacgtaaaatattgccgctaattttggtcattttgtaaaacaaaagataatttagtggtgcatgcctttgacaaagggaagtatttgacaaaaaaaagaagaatgtgattcattagaaggataatgtcaatttttcagttttaaaaattctgaaagttccaaccaacaattaggttacccgagatacttgtcggtggtgatatcaacacatgtagaacactagaagataaggatattcgttggcatttttaaggttttatttactatacaatacctaacgttttacgaaagtatcatataaacactaataagagaaaaggaaaagctaaaaggagaaagatcaaaagaattataaataagtaattttgtaggttagtactatttttttgtaatacctttttttattttgtgttgcttgtgacatgcatctacagaaaccaatcggtgctgagtaattaaaaatttgtcatgtagattaaagttagactcaagaatatattctatacggttttaataattactggctagctattatataacgtcatagatggaaaaaaacaaaaactgcagaatttagtgacattttttaatgaatttagcctcagacacagttctgccctaaacacaaatggttagataactatgacaattctgatgaaataataattcacaaattattggacatgatatatttttaagtgtgctttaaaatgaatccaaattaatcatgtatatattaagatgatcgattgtgtattggtgaatgattattagttatgactcataatgatattctttgaactatgttatcataatcttttcatacagtgctttacaccctctactttatacatatttatttcaataattgtaattagtggatacaatcattcaataattcatttaatcgattaaagttttctattgttatgttttttgttttataagtttttcaactcttccaaagtaatgtccatttcttttataaatttgaatattctgagcaaaatcatggaataaatgaatgtactactaatttcacgccaagaaaatgaactctataaatgctatagcctttcgtatgaattatgagtcatttatttatcttcatttatttgaaatctctaaagtccaactaaaaacgtttgcaaattcaaaaaccaaaaatattagttatgatccgtatgcacaaaccgtagatttaaggaaacgaattaagacttaaacagaggtcactgacgttgtaatgacttatgtgctgtctttttctatcacaaaatgtcttaatccaaagtattaattagtagtagtagtagacccatttaaaaaacttttccaccattaaatagaacaaacatttcatgtgttcttgatagttgatagttgataccaacacatgtctaatgtttaatatggttatgctacagccacaacttaacaattatacattagcatgattgcatctacatataaaaataggtattgattttttttttttcttaacctaaacgagaaattaactgatcaatgaagtttcacatcaaaattaaatctcactctaggaccgattttcctggttcaactctcaaatacatcggttcgttctgatcattgatttgagtggcaaagtctataaaccggggtaatgccttcccaaacgaaaccaaaccggaccgaaattctcattttttgtgagcttccaaatcagacattagcttagccggtttagcctttttctgtcggtacttggcatatgagtaccacacaccaccagctgtgttgaccactaaaccggacacgttcaaagcatgtacttcaacaccacccaagaggacaaaaccgagcgtctaggagattaaaaaggaggcaaagattagtaaatgattgcctctatagatttcatctcgaaagagagccaaatgagggtttatacttacagtggaaccaacgcctttgagaacaccaacgatggttgttgttagtgcagagttcacaatggtgcaaagaaacatggtgaagttgaggacaatgcccataaccagtgaaagaatgagaatcaccaagaacggcaaataagaacactgtcaaagaaaaaaaaattgattttgacattttgaagagactagtttctgagaatagccgcaagcttggaatgatgaagtttctaacctttgcaagtaatagtgatagagagtttgggaattcgccggtaactatgatgaggatggacaaaaatgggagagaaaggaagctgttatagaacattatctcgatggaggaaagcccgtcttctgcaccagacttctccaccagcacaaggtacatagtctgcagcaatgatgagaaacaatattcatttactcgtatgggtgagtggagactgatttaagagaaggaaaagaacaaatgaaaccaacctggaaaaagacagatgttaaagccaaaccatacccaaaaagatcaaaagaaaaatcaccaagagctgcaattacacagcctgcagcggtaagtagtacagatagagcaacctgaaaattaaacaaaagattcagagcttgaaacattatacaaattcacaataaaaaatcaacattcttatggtaagtacctgagttgttggtttgcctttaccaaacaaaaccccagaaatcaaaacagcaagtggagtgagtctcttaatggcgatatacattggaatgtttactcctttcaaacttgcaagagcaaatgcaacattagcattgtagaagatagaaaccggaagaagctttttggccgtagccatatcaattcctttagctcttgtgtatcccattcgtctaccaaagtgtataagcaaagaagtagccaattgctaacacaaccaaacaaaagcaaacgggaccgaattc

SEQ ID NO: 653 - DNA, 90902 bp, Arabidopsis thaliana
gaattccaccgatctatgcgcaaatgagatctctgcaatgacattatcctgtcaaactctgtttttcttcattagggagtgtcaagtttttaactatcctgtagtttcttcgttttctgtgagaggattccattataatgttgaaaggccaaagtgtagaattcagaagaagtttgattggataaagatacagtgcaattccaaacagttacagtggcaactagtttaacaaaaaagtaaacttcacacaaaagatcttcagagttcagacaaacactgtaacagcaaatctaggctcttccacttaatggattgagataaaaaaatgttcaaacacttctcttcagcaataaataagcttgattggattcagtacagtgcaattcttaccgtggatagtgattttcaggtggtatgtataacattgcaccaaacaggggtagtggctactagtttaactaaaagtaaacttcacacaaatgcttaagaactcttcaggcaaacactgtaacagcaaatctaaactcttcctcttccacttaaggattttttcatctagaaaaactggtgcggtgtatcgaacatgcttcataagatcttggaacagatcgctctgaacatgtggaagagtctgggttgcaccattctagtccagaccgagaagattcaggaacacgctgggcaagcaggcgggctgcgtctttccaccatgaaacctcggtttctttctcttgtagtctgcgttcaacacgattcagagcagtctcaagcttcactaactcttcttgttgccttgtctccagtagttcatgcagctttttgtctagttcgtacggacacactccatatctttcatctgacaccaccatctctggtatatgactctttgtgacctcattgtcctacaaacacaaaagaaccacaagtctgagaatcaagagcctgtttcataattgcttaaacagttgaaacccaacttaagaagataaaagggttttctttgaagtactttaagtttgcattgtctctgaatctgatgctttgtttgtctatcctctgctttttcacccagaggtaacctacctacctcagcctggagttttgagttgcagtctgttcctcgacgataatcctctggctctgagacctcgaattcggtgtactcctcttgaagaacactcgatgatgactcttggaaaatggatgacgccaaattcgagaattcttgaggagaaaactggaaaccgcttgcttcatttgaagacataggtgtatccttcttctgtagttgttcttttgcattaagaagaaacatctccatttgcattcgcaggtttgtcatcttatcaagctcggttttacttgcaacaacaagatagagcaaaaaagaaccaattcccacttccaaaggtgactctctgctttgtgactctgcacaaagaaaactaagtataagtctataaacataacccaccaaagacaagtcttgtttacctataagagaaaaagggaactccttcaaattctaaagacaatcttaccgttcaatgatcattaggctatttccagagaattaaaagtgtatgaaaaagaaaaacacaagattctcaccaaatgtattagtctccggctctttactcttattcaggcggcagttctgcttattgtcctgcattaccagctgatttaaactcgtcgaacaccttataggcgctaattgataccttctggtgtcatcttcttgttcctcccctgcatctctcttccccttggaacttctcaaccccgaaagccaccggcccacgaatctcctaggagtataacactgcacgatagtgcacccatctcccctcctccgccgcgagccttccattgaaaaccaagagaagacagaaaacgaataatcatgggtttttgggtttggaacaagagacgagatttaaaaggaagaaggcttcgtaggagggaccaagatcggatagacattgataatggtgggacggagtcgtaacagagagctatgaacagatggggagaggaaataaatgagaatcacgagacttgcagagtgagtttatggagggaaactttgatttttctcatttgaatttttgcgcttctttttccgatcattgtattaccaacttaatacataatttacttgtgtaacacattattaaagaatacttaagatactatttagtgatgtccaattcttatttctttctcaaatgactccaaatttccaataaatgaaagagactattgtgattgaatatttatggtgacccttttttaaccacatcatttatttcaaaattttcatatacagtattcagacgacatctaactggttatatagaattcgtacatttaaagtttctcgaatacttatacgatttcttcatctacttataatatttatatacatcttttatctcctaatcgaaagacacaattcgaaaacgaagaatcattctaaacaaacaaaaacaatacattcactaaaaacgttcatgttctagattgctccattaacctcccagatatagcagcagcaagagcagctgtaaatttcgaatcttttgttaacgatgacgccatttgttgaatcagaacctcttgcatcgtattatccctttcgtttttctccaacgctagtctatgacagccattaaccagatccaaagtcactgtgcttgacccaccctggcttgtagcatccccttcagaagcatttggacccaagtggttatgcgtcccttcgtatgtcgctacaagtaaagatggatcctctgcgctgcgttgtacctgaacagtaataccacagatcattagacaactgaagaagcaagcagagataaacaattacaaatgaagctataaatacaataaactcgatgtgtgtaaattaccttcttttttactggacaagacggtgcaaacgagcatctaaagtaagctctaggtgacgggttgtctcttgtaaccttttgtccgtatttcctccattgaaatccatctttaactgtctgcagagttacactctgcttagtcatttgtctctatgcaatttcaaacatatgactctttaatcaaaagattcacagacaaaatcccttaccaagcttgtgtccgatgtttcagtaggcacgtagacagtcgaaacttttgctttgttgaagctatcagtgactggtcttttacatgaaagaagctgatttttctgctcatgttgctgatgatgatgatgatgatcttcgttgctggagctgttctcagtttttccactactgagtccaataggaaagcctaagaactcatccgggtcttgttttcttttctttatcggtatatcggtctgctcgatttcagggctctggcgactctgaagcttctccaaatgattatgtagttcgttgtagctctcacagactctagctaacatctctgttagcttcttgttctctgaattaactctgtttagctcctctcgtaactcacttgcgctctgttcattaccaccacaaagatcaaattactaaaaagattcttcctttttgttccaaacaagattgattatgtaaagtttcagactttatactaactacatcatcaccgattcatttcgatgcaaagacattcaaactcagacccatcttaattgattcgtaaagtactaaagtgaagttaaagaattgataaaagctgaatgttcgaacaagtatatgaagtcgaaggtagtgcacaccaagtgttcgacgaaagaactaacctcgtcttgctccaaccatttcctctttaagtgagtagaagccaaaactgagacctccttcttctgaaatacgaaaatttgaaatgaacccatgattaattcccaaaatcccagttcatagaaattgaagggatacaaaaatcaacttagatttcgggaaaatggatcagacgaaatccggacttaccggaagttttgcggagaaaggattggtgttgagatcgagagagatgtcgagaaacgaagaaccgtccataaaagaaacctttatcttaagatacaaaccaaaggactagttggtgcgtagtctcaatttgctttcttcggtcacaagttggtccgactgaatgagaagttcctcggagcaaaatggctttatttatactaaaactacaaagacagagacaagaaataaataataaattagtttgttgcgcagaaattaaagtttatttaatgtataacagatataagattaatatataaattttatcctaaggtcaaatttaagattaataaatttgttgtgattaagtttttaataaaagagctttaacgaaaatgaaaaatcataaataaatgttttattaattgtttagtgattaaaataagaaagtttttttaataaaagctgtaagtacgataggaataaattaaagagataggttttgggatatgttaggaaggaaagtcgttcgaaagtgaagataacatataaaaagctgtcttctataaagtccagaagacattaaagactttgggaaaaaaagaagaagaaaaagcacaacaagacatagaaagctgtctattaaaatcacactgattggctaaaaatatgggattgtgtaaaacattctgaattgtgttatatctatcggtatgtattttcgtatgcatgggttaaatttactgtcgtaatcattcatctctatagtacatgttaaaaactagatcgttcattatggatagaattatacattatagtcttgtacgatgaaggtgacaaatatcgtttctagtagactatagaggagatataggtgattatcataaacatgtttcccaaaataaaatcaataatatatccacatttagaaatttgaatactttgttgtatacgaatcgtaatttattctgctttagtcactgttaggtggtacaattacaagtgaaattacaagaaatctcaaataccgtccaaagacttgaaacgttcaatttataagtctctaccaactagaaataaatgataagaaattaagaattagctatgcaaaacttataaaagcaaacaaaaaagaagcaagtagaagaaagatccgaaaaatcaataatttcggcggggcagtgtcccatgctgaagaaaaatttggacgtcatacataaatttcaatatgtaggatctgtgttccctttatatcctcttctatttaacaaattttttttaatttgtccagactccagatccataacaattacgaactttcccttgacttgcttgaccattgactctgatttgtaggtcggcaattctttttctattatatcctagtttcccttactatttgattaataattcactgattgatattttactgtacaataggtttctgtttgtttgttaaagtattctttttagtactatacttgagttatatatttaaattcattaaccgtgtgatatttacttaaatattttatattttgaaatagaatgagtactatttaacaacaaaatataatgtatttaattactaattactacttttttgtcgttgagagattgttttgggaaagcgaccaatcacattgcatgataaatttaagtcggtacaaaaaaactttctaatcaaggaagtgttaattaacacaaattaaatatgagccgacaaaaaaaatataaataaattgagagagtgaaacaaaaaacgtggaaaatttttggggagaagaagacaaagagggtggtgagcccacacgggaaaagggcaacaaaatcttgactggactcgaccgcgacttccaacttgtgagaagcttttattatgaggtgtgaacaagttgccaccttgggcggctccgacaccgacctctatttttcttgtcacttttttttgtttgtttgttcaaagttgtgaatttagtgtcatctttaattattccgtttctttcaaactcaatgatacaaatgctaaccactattccatgaagatttacaaagatcgattgttcgatgagattcttagaatctagttaaaatgagttttgattttattgatgtaagttgacaattttgattaagacggaatcatatagtataaatattaaaacttgttttcaaacttatctgagtttttttaccggaccgaagaccaaatcatatgatttgttttcaaataaattcaggatttagtctgattctcattaaagtcttgacttcgggtatattcggtttaagctaggttactatatgcggtttttgctcttcaatacataattattccatgtgacattcatttcagagaagaagctttatgtgatcttcatgaattgaatcaacttgaaagatcaaatcataataatttttgaatataaaataaaaattgttgaaacaagagacttttgatatcctttcctaacacaagtttgcatgctaactctgaacaccattacactatactaggtatttatgttattagaaacgaaattttttacagtgtactaaatataagaaccttttttgacaaaacaaattcaatttagattgcaaaacccacatgtttccacttggttcgagtttagtagcaaactcttgctaaaagaggtcgagatacattgtgaaaacgaacgaacgaacaatcgttctaattgtggaaggaattttgagagatttggatgctgggaactacactatttcggaaagctcactttgtaccccctttttgtttccgaaaaccattaaaatttgcgaaacaatcaagattaatctatgtgatatgtatattaataaactagattccctactacgtaaaacgtctgtaataggaatggaaaattagtaatggggattcataagtggaatgatctgttccccgatgtagaccaaatagaaatttctcatcactagaagtttgatattgaaatttggaccaaacttctttatctttttacgccacattaatcctatacgtaaagtgatatagatcgatgacagttgacgaacaataaagatatattggtcaagttggatattgttaacaagagatgaataacaataatataattagtgaagaaatgagttagggctcatggaaaagttaattaaacaaatataacatggttggaaaaatatttcaggaagtgtttttagtttattgatcctatgtggagtgataagtcttatcataagaccttataagaaagacgaccaaagatctttcttaagtcgtcgtgtaaaactctctctcggatattctacatgacgacgtcgatacgatgacgtcattacgatcagcatctgaaagtatcatcatgatacgtttttatatttgtctcttttgttaatctgaaaatacggtttgtaagagcggtttactaaagaataatttagttttctcatttgcatatctcttcctatcggagaattaatttttattttcttcaaatttaatcatgaactcgtatgtgcataaactattcatataaccggttaaattactaactttacttgttcaatttctaactaaaataaaattttggataattatttaaatctgttatgatagttttaggtcaaatgtttacgtgaatttaaaatttctaaacataagacttcagccgaaagaatataattgcagaaaaaaaaaaaaataatcaaaaaatgattatgacaaaaatagaaatgaatacaatgcttggtaattagtgtacgaaacaaatcgatacattaaccatttaaaattaatatagcgatatattttatacagtatctttaagaaagacttaagttgatgatgagtcaagcttatttaaaagctaaaaccaaacggaataatctatctgttagagatttcaagaactaatagaaaatggaccaaatcgatttgtttgtaagtaaaagtaaaaactatagactagttgctcaagtcatgcgacaatttagccagacatattattccttatgtatgttctcttttctgaatggtggtgaactacgttacgttcatgattcatcagcctcgttacgtaaataatcctacgtcatcgtttgtgcatcatctatcattcatcagcctccttaaaaggcttacttgtcaaaattttaaatgacttttgagtggaattattgttaaaaaagaagtcatgattttttaaattgtggtctcaattaggaccagagctttatcccagctttgaaaaaagtaagactcggattttgattcatctaaaactaagtcggatatttccatgtgttagatttttattttacgtttccttcatagaaattctgattaacccgacgtttccatttctataaacatcattatatttgaacgttacaaagttttctcagttctaacttaggggcaataataaaatacaatctttggacgtgtggtggtttaaggagacaatcataaactaaacaatgatcttttgaagggtaatcaaccctcaagaaccagaccgaacaaaaacaaaccgaaacgacctctagtttggtttcaaatcctcaaaccaaaccaaaccaagccaaaataaaattatctctgaaacaaagctttgatacaaaatccacctcaatctatagccaaatgaatatttcaatatccacctttccaattcgaagtcacaccataactatgcttatacaaaattcactaccaaaacctcgaaagtcaatagagatgaagaagagtatttcacctatcagttcctagtttcaatctcttcctcctcctgctctgccttgaagctttgcgagtaatgataagaagagtcttctttagttttgtggtcttttagtttccacttttgtatttgtaaaactctaacatctcttcttccacgggatgagtctcgcctactatcacaagacaatgcaacggtgctccaaaatcaacgctttcgagttgcttcatcgtccctgcaactatcgtctggtcctcagagccaagccgggcaaagcccacacactgtgtgtcttcaccataaacagaatctccatgcttttgctcaacttccagaagctgctcgattgctgtattaacactcatatacctcggcggttcatactgtttcttccctcctctgcatagagattcaaaagtaggctccttcactcggatatctagcaaacagagagtgtgaagtccaagagagcggttcttcttgatcttctcataaaaactatcaggtctccaagtctcggtaaagaatgggatcgaaacagtctctccataatggtaaagctgcaatccacaaatcccaacagcattcatcaccgatgcattgtgcactacctctacttttacaccgagtgtcttagctcgaacaacaagatcactatgcgttgtagctctgcaaattgcatttccaacaaaaccatttcaaacatcaatcccaatctaaactgtattgtatctattatctaactaactacattaggtataaaatcgaataccaagataggatgagaaaggtgtatgtacccgaaaggatcaccaacaacgagaaaagcgacatcattatcaatggcttcatcaatcatatcaccagccttttcttccaccatttctctatcagcaagtataattggtttcccatagaacttttcctgagaaaccaatcaaagaactttaatcagaaaactgggtgggaaagtaatgaatctactaaatcaacgaggctttgagagtcttacaagattggaaagtccatcagcagagagaccaaaggacaaaagagaagtgtaagcttccatgtatactttctgtgatttcttaacagcctcgagtcctctcaaggttatatctttttcatctcctaaacctaaccctataatgtacaacatctcttctgcttctctgacaacagacaaaaacaaaaccttaaaacatgaactaatcactcaatcagacaatcagaagaacaaggacaagctgacgaacttagatctaaggaaaatcgacaaatccatagacttgaaagaccaaaagatcggatttttacctgaagaattgcgttgaaaactccgaaagaaaaggctctcacttgataaacctcagcgagcggccgagagaagaaggtcaatactcaaaaccctttttgtgtctctttgttttttttctttattgctgttttttttttaagtcccatgaaacaatgtcgttctttggagttataataaactaatttaattgggatacttatttatcattattaaaaagagttggtagtaatcggccctgattattgcatttagggcaaaaaaattactacaatattgtgatgtttattacactcttgtctaagaaaggagattagagtgattgaatttgaatgaatagagttacaacatatatagattattaggcagtgcaagagagttgaggaagactattttttttacggacaagctcgtgcatatcatgcactatcttgaacactgcttctggtttagccagcctcaatgcattctgtgacattatctccaactctttcgatgccggtccaaaccaatccgctacaatcttcgatatctctttcggtgattttgagaatttcccacatccgttttccaccacgtacggtacattccctgcctcctgctctcacaatcaaaacccctcacaattgaaaacctgaaccaacatataaatgggaagtttttagagtggaacttacttgaccagcgatgtaaccgtttaagattatcggtaaccctcttatcatagcttcagctatagtgcctggaccagcctgcacaagccaagtcacaaacattgataaagaaacaatcacttttaaatcactcttatttttccccatcaagaaaatattaaccaatgtaacactaaatctatatagatcagtttatatgcttgcttggttctgttcggtttacctttgttatgatgcagtcacaggcacccatacattcctccattttcgttataaaccccttaacctatgacataaagaacacagtttcagtgactaacatcaaacgcctaagattgtggatttggtatgaagagtgacaaatgtagagtacctggacagggattttccagtctaaggaacttaatttgctttggagtttcttgttccgtccacagattataagaacctgacctactgcttcaccaagattcttatcatacaaagcatctgcaagtgctcttgctgttgcctcgatgggacccatcccttctcctccacccattaacaaaacagctggaagattctcatccatccctagctcccttcttaattcaacctgcgattttttcggacagatactattacatttggatgagtcggaagcaacaaagaacagctaggaatgattccaaaaccgacctttgggcgaactggtttcacaaaggaaggtcgaacagggaggccataaactttgatttgtgatgtttcaagtcctgctttttgagccctttttgccacttctgttgatgggcaataacatcttgtcacaagcttatgaaacctaaacatcaaaacaaacatgttgtaacaatatattaagaaaagagaaccacatgaacgatttgataaaacaacaaaccatgtaggatggcaagtgcttaagtctgtaataaccgtggtgaacacgattttcttaagcaagccttttgatcttaggacacgaagtgggacatgttgcatcaacggatgaacactgattatgatatctggttgatatttcattaacccttgggcgatttccctgtaagttataaaacaatggtatcagattagaaaagaaaaagacatgatagaactccgtaagagaagcaaagacccaaaaaagctataggctaaatatgatgctcctttctcataggaacatttaaagactcttgattagaatcttctcataattatagttggaacagacaaatgaattatgaaggagtaaccaaactatagaccttaatcctcacctggcaataaaagtggaagttgcagcaaaattagattgatgaacaatgcgtggagatgtaccataataagtcattttccacagagttccatgtttcaccagaaaattatagctcctgggaagctggttgaacggccagggcgtatgatctgtccacaaatccgtaataaacacctgcgcaagcactcttagaacggaacaaaatcaacaatggctcacactacttaaagtaccaaagatctagactttcaaatgtatttggttaattattccaagaaccaaatttaatttaaagtcagtttcacactcttcagctggaacattcctaagccatcaagtgaatgtaacgcaatgctatccacttacatgaaccaaacatctaaatcctattttctctaattcaagaaactctaaacctgactacaattacaagtttataagtaaactgaatctgaagcttcgaagaactctaaaactaagaagacagaatagagattctccgaacatccaaacagatacttcaatttactaccaaaacttgtaaaagtcccaaactgaaatccatcaatgatcaatcaatcgtgattctacccaaaaagatggatggaaatatcaagacgaacctggtactcatctccaaactcctgattaaaagcagctctaatggcttccgcagaagctctgtgaccaccaccagtatcactcatcaaaatcaaaactttcttcggccgatcagcttcaacaccattcaacggcaatccctcctcacccaaaaccccaccagtcccattttccctaatcccattctcatcactcgataatccgactcctccgacggaggcaaagctctccggaaccactttatcgcagtgaaacctaataaagctattgaaatcgctgataaacctacggagactcgaaccagcactgctcttagtgttgaagctcaaggaagctagggtttttcccatccttcgggagggtaaagtccggaaaccattgaagtacaaggcattggacgatgagagagcatacccatctgaattcgaacacggggatcgatttctagaggttaaacctctgagccgtgggaagaaatcaaagaccggtgcggctgattcctgggttaccgttgaagggttttgcatatttgatagagagagagaagagagattcaaatagccatgaatgatgaagcgcgtcgtgggagagattgcaaaccacaaagataggatttttaagaggagagtggatgatggatggattcaggacgagggaggacgattggagttttgttgtttttgtgtaagaagacgacactgcttttggctaaaccgaaatacttatccgaatattctgtgggcaatttctaccaaaattcaggtaaccaatcaaccaatttatgtaaatgtaaatatcgtgtactcattaatagtttccaaataaaataataaaaatatttatttgttgattctagtatcatgttaaaagcttataaatggatgtcggcataatggacaaattaatttcaaattttagcacatttatcagccattgtatcactatcacctttaaaatctagagtaacaatgtgaggaaatgttcaagtttttcttatatatatatatatcagtttatttgatttttgttttttggtgagagagtgattatcatgagtttgggaatggttttaaccaacttataatgaatagagatacggtatatgttttttatatactggattgatattttagctcaattctctcaaccaaaagattttccgccttaggcttatagtacttcggacccgatccaagccacatggtataatactatagatatagatagtctacatgggttctttggtaaaatgattcattaaacagcgatttttctttttttcttaaacaaccgattcttgtatctgaaaaagagttatgaaaaaacgaagtataatccgactcagacgatttatcgaattcattaagatttcaaaactcgtgagtcaacgttggcattctgatgcacatgtgtttcatgcttccaattctccactcgttcctataccttaatactataattttgaggtacttttgttatttatagttatatttgagctactcactcagatataatcaataatttataaaaggtttagattagaaaggagaaaagtggaaggaactcgtcatggaatagaattcgttattagtaagaagactacgaccgaccaaagaacaagaaaaaggcacgcatggtgtgaaaactaaaagttggcgaggcatgcctttcacatgctttagattctaaaacaaaacgtgttttacaaggaaactacgacgaacatgaatttaattattctaatatctaacaaatataggtgcaaaacctaggatatccctcacattcgtttagtttcgagaaaaattaacagacaaaaaattatttatatatcaaactcataatcaactgttgcaactatgattttaacccattatcaaaaaaagaaagacagaccatttcttataataggccctattttaacggactaaaatcaaaactcgcagtacacatggaaaatgtttagtgggcttttgggcctaacccaaatttattttcaattttagcttttgggcttttggttgttcttcttcattccgcgccgccgtcccgcgttttttctttatttgactcttctcttcgaaacgaccgtggttttggtgtttattgaaacgacatcgttttgttcttcttcttcctcagttttgattctcaaaatccacaaccctaaatccacgcttcttctctgctcttcttactcaattcttctgcctctttcttggtccttgtccactaatcgtttgttcgtctcacggcacgaattcaaatttgtaagttgagctcgtcgaattagtgaaacccgagaatagtagaattcagcagagagatgaagattgcaattgaaggttgtatgcatggagacctagacaatgtgtataaaacaattcaacattacgaacagattcacaacactaaagtcgatctcctcctctgctgcggcgattttcaggtaatcgtttgtttttttttaccttgaaaataaaaatccattcgattctgcttcctaagtctgaaaagattcgttctttgtggaaaacattaggctgttagaaatgagaaagacatggatagccttaacgtacctagaaaatacagagagatgaaatctttctggaagtactactccggccaagaagttgctccgattcccacaattttcattggtgggaatcatgaggcttctaactacttatgggaattgtaagttatctagtatttgagtttaggattccgaggcttaaaaaatgtgttcttgatggttgctggttgttgtgctataggtattatgggggttgggctgccaccaatatttactttttgggttttgctggagttgtcaagtttggtaatgtgcgaattggtggcctttctggtatatacaatgagcgtcattaccgttcaggtttgtttcttcttcatctctctgacaaagtaccaatttttcagcttttgaaatgggagaaagttggatttctgagttagtgtctatagtggaaatgtatagattagggaattcgtttgatttgtttggtgtcaataaagtgagaatcagtcatttgtgtgagtaggacactttgagcggccaccatataacgagagcaccatcagatcggtctatcatgttcgtgactatgatgtccagaagttgatgcaacttgaagagccgcttgatatatttctatcacatgattggcctgttggaatcactgattatggagactcagaatcacttatgcggcaaaaaccatactttcgtcaagaggtaaatctgtgggaacatgattctacttcttcattttggttttgagaggttttcaattgatttgaccaaaatttattacagatcgaggaaaaaactcttggaagtaaaccagcggctctactgctagaaaaactgaagcctcaatattggttttcagctcatttacattgcaaatttgctgctgctgttcaacacgggaatgatgggtcagtgacaaaatttcttgccctcgataaatgccttccagggaaaaagtttttacaggttctctttctttcctgtccacaacattatgctttgttcttttgaaacaaaaaggatatcttttaatttctttggatgttcattagattattgaaatcgaatcagagcctggaccctttgaggtcctatacgatgaagagtggctagcaatcacacgaaagttcaattctattttcccgctaacaaggagatacacaaacgtcaggtataccatcccgaacaagctacctactaagaaatgtttatatatcttccatttatctttctacctaccgtcccacttacgtattgttttactacaatagcactgctggaactatacaagagagccgtgagtgggtgaggaagaagctagaagaaaggcaatttaaaccttttgagtttgcgagaacagtacctgcatataacccatcacaacgtgtatttgattccattcctggtatgttaatagtgtactggatatagaggattataaaaagttgatggatcgattaaaagtgttttattcatatggcattttgtagagatcccgcagaatccccagacgctgtctttgttagagctccttggtctcccatatctccttgattcatcaccagtaacaggggaaagaaccgatatccctgcttcactggctccatcaggtatgacgatagttttctttgtagatgaggacttggtttgggattatcagatacatattctgtgaagttgttcatttactctttctatctgcctattgtcatgaaactgcatcaagcaccaatgacagagatgtttagtgcagtgtcaagaatcaaacatgtcttgttgtgtattgcagatcttccgacatatgatagcgaagaaatcccaattgatgacattgatgaaatagaagagatggaggaagcaaaagcagatgatcatacaagagacgatgcatgaatatctccattccagtggtcagaatatattttatcttgctaatatctgactgcttcatcgtcaagctggaaaacaaccacattagttgggattctgtgattagaaaaccaagttttcttgttcattttttagaatcagcataagttttatttgtgatattaaagaaaagtgaatcataaaaatgtcttggagaaataaaaagttagatattaatgtttcatccagtattcaagaaagttgatcaccttttcttccacaagttctctggcatgcattggcttgggaagttactcgccgacaaaacccatagataagtatgtcggattcacttaaaaccatggatgatgctgggaatgttggattcaactaaacacgaccatcaatgattcttcattgaatgcgttgactcaacttcatcacctcaactaattttctatctctgacactaacatcaaatgcaaattatgaagtgaacagttgcagtttattacaacaaccttcaagattcctctcattctcctttctattttcattgtcactttattcgagtcaaaacacagagacaataaaaatggcgtcctcttacagaataaactgttccactcttcttcatctccttatgtttctgtctagtcttctcacttcctccgccaacctctcctttaatttctatgctagttcttgttctgtagccgagtttctagtcagaaacaccgttagatcagctacctcctccgatccaacgatccccgggaaactccttcgtcttttcttccacgactgtttcgtccaggtaacacgcactaattacgaattactgaggaaagttcaaacaatttggcttaaactttgtttgttggttgaacttgcaagggttgtgatgcatcagtgttgatacaagggaatagcacagagaaaagcgatcccggaaacgcatctcttggaggattctcagtcatagacacagccaagaatgccatcgagaatttatgtccggccactgtttcttgcgctgacatagttgcacttgctgctagagacgccgtcgaagctgtaacatttacttcactcccacttcacttcaatctatattgctctaatccggtttaaccaatcccaactgaaccgaaagcatacacatgaaatcgaaaaaaagaaacaaaccaattctgtatcattttcgcatagactacacaatgaaccaaatataaccggagttgtagatacattaaaccggttatccttattaaggtttgaatgtttttcttctttggcgggacaggcaggaggaccggtggttgagattccgacagggaggagagacgggaaagaatcgatggctgcaaacgtgagaccgaacatcatcgacacagattttactctcgatcaaatgatcgatgccttctcttccaaaggcttgtccattcaagatctcgtcgtcctctcaggtatatatcaacgtttcttgaaacttctaatcaattttaccaacatgttttgctaaacgcaaacagagtatgaaacagagttttttttctttaactatggtaaagtcaattcttgtagcaaaatctgtttcatattctgttacactcagcttcttctttttttatttacattcaggagcacacacaattggagcatcacactgtaacgcattcaatggaaggtttcaacgagactcgaaaggaaacttcgaggtaattgatgcgtctctcgacaactcctacgcagagacactaatgaacaagtgttcgtcctcggaatcctcatcattgactgtgagcaacgatccagagacatctgccgtattcgataatcagtactataggaatcttgagacgcacaagggtttgtttcagacggattctgctttgatggaggataatcggacgaggacaatggtggaggaattagcgagtgatgaggaaagcttttttcaaagatggagtgagtcgtttgtgaaactgagtatggttggtgtgagagttggtgaagatggtgagataagacgttcttgttcttccgtcaattaaaaacattgtccgcttcttaattaatttgtcccattttggatagtctgtaatgttatctcttaaattttgtatttgtgacgagttttggtacttgaaaatcgtcttctagttgtcgagacagatcctctttctaaagttgcgtctaatatgggaaacacattttcgatttggaaacaaacaagaaaacgagtagcaagtaaagtgaaattatttactactactagttagtacagaggaggacgtgagataaatcaagcgtagaacaatcagctgcatgtgacagccacgtgtcgaaatctagtgagaaggacggttgattcattctaacttgggttcaccgtaaagttgacaaacccaaaaaaaaaagaaaaaaggaaggaataataatcatctttttaggcccacgagattgctctttgcttatagagataacatcaaatatatttatttctcaaattaccaactacttatccgtaattaaatcattattattaattgctaataatgaaaacatataattgtatccataattaattgggtatcatatttcaaaaagttagctggttcttcgtcataaatttctccagttttgtcaaaaacgaagaccacagcgagccctaaatcttgtcgggcgttgaatcttacaaatttgcaagtgattctcgtcatacctgtatcttcttcttcttcttcgttcttcttctggtacgcccaaattactctcaaatctcccccaaattactcttatttttcgatctgatcgtgctcaatccattgccatttcaatttgtttgctcaatccattggctatttccaattatctgctcattatttgtgctgtggatagtcgttctggcttcaggactcggtctcgtcattggtttgatatgtctgttgagcatttggtgattattgacatattgttttacatgtttttcgacgttgtgttaggatttgattggtggacaaaggtagctgaatcagcttcagaattgaatttgatctttgtttgagacaagaagcattggtgtttggagcatttctgaggagttatgggatatctgaattctgttttgtcatcttcgagccaggttcactccgacgatggacctgttagcggtggtggcctcaggttcacttttctctttctccccagcttaatctttctcaggtttttagtattaagttataggattaagaatgcaactacagattatagattgctcagaatcatatactctttttagcctttattaatgtctgattcaagtcctagctactgatttgaaaccttgtcttggctgatttcttctgataactcttgcgttatacttatctttattggaagctcatctctgttggtgtgagttaaagagttattgtgcaaaataatatctcaattatacatgtcactcctcaaaagtagaaatcgttcttcgaatataaatctgcagtttagatgtgtgattatatgtttgcgcattggcatcattcctagaaatgtgactgtagatgctgctgctgctgctattaattttaatgaacactctaatatgtacagtcagaacgggaagttcagctatggatatgcaagctctcccggtaaaagatcttctatggaggacttctatgaaactaggatcgacggcgttgaaggggaaatagttggtctatttggagtctttgatggtatgtatacatgcctctctaattacattaactagtctgtcactgactatatcttgcatgtaacaatttctagttctattttaagtttctagcatatgcagaattgtagacatataactcggaagttatgagtttcgatatggtaaattggagatgtagtaggttcggtttctcttgatttataagaaccataattcattgacgtcttctgatcaaatagtgatcttacgtgaatatgatgtcgtctttgcttatttgctacttgttaaaatactctaaagagggcaatatagtgatgcagataatatttatttccaggacatggaggtgcacgtgcagctgaatatgtgaagcaaaatctcttcagtaacctgatcaggcatccaaagttcatctctgataccacagctgcaataggtgcttttcacctttaatattgttagccagatgattcaataaatagacctagcaaggtgcctaattctgactttttcatttgcctgctcctcatctcagctgatgcatacaaccaaacagactcagagtttcttaaatcagaaaatagtcagaacagagatgctggttcaacggcgtcaacagccatcttagttggtgaccgtttacttgttgcaaatgtaggggactctagagctgtaatatgcagaggtggcaatggtaatgcttgttcatttttattatagaactttttttttgggggatttgaatggagattagaaggttgaaaaaaagaaaaaaaaaagaatggagattagaagatgcttctaagtgatttataccaagtggccctgctttgacgcttagacatcatccagttcgaccaagtcattaggggttaaatattaagaggtcccaagggaaacataaaatgataaatttgccaaactgtatatgcaggtcttcgagtcataactaactccacatacttataatcacatgatagcccttgttcatgaaatttgcaataagtcgctctgttttgtatggtactaatttgatatttttttttgtttgtcaaagctattgctgtatcccgagatcacaagcctgatcaaagtgacgagcgccaaagaattgaggatgcaggaggatttgtcatgtgggctggtaagaaaacatttaactgaaatttctcttcttatttgtgcttatataatttgcttaattggaattatactaaaaggaacatggagagttggaggagttcttgctgtttctcgtgcatttggcgataggttgttgaagcagtatgttgttgctgatccggagatacaggtattgactttttgccaaaatctcctcctatatattaaaaatgccactttgttattaacaattgaacataacctgcattggatttcaatagttagctacttggtaaaagagtgactgttttgtgttacttgatacaatcattacccacattttagactagtttctagaatggcactttacaaaacttccttcgttcactcattagcataaatggaaaatttcaggaggaaaaagttgatagctctctcgagtttctcattcttgcaagtgatggtctctgggacgttgtatctaacgaggtaggaagtgtcatttgatttctaaacttccctgttaaacttcctctttttaacattcccaatcctcggactcaaaaactgatctctgttcaaatctttatttcaggaagccgtaggcatgatcaaggcgatagaagatcccgaggaaggtgcaaagagactgatgatggaagcttaccaaagaggaagtgcagacaacataacttgtgtcgtcgtacgtttcttttcagaccaagcaggaggaataggttccagcagcaccaatatcccaatagatcatggtatcgtacctgaccgaatctccggtgactcatcaacctagttctaacattggtaacatccttttcgggtttcgtgatctcaaaacaagtgaatctgggagattatatattgttataaaaaggtgaaaggttttcaagaatatacaaacaaaactctcacacgaacgttttttgctgtgtcgtgtatcttttgttgttgttatacatttgttacttgggtatgtagctatagagagaataaatgtattagtacaagttctgattcattctacattgtgtcttaaaaatttgtagtttcatggatacaatccacctgactaagattcaaccttaaaaaccagatactctctatctcagtcccatcttctgacccaactccccgagctgctcaacgagctcagttccagtaaggatctctgtggctccatatataatgttattaaccatctcctgtcgctgcgagagctcctgcaaactgctatattcaatgtagttacctccaccaatcatgaagactatggcttcttcgaaaggccccttcacatagctattatcaatagatcctgactttgaagctctcgcatccagtatgaggtatgaatcggtttctgggtttggttttccgtcagttaaggcttcaactgtccgtgccaccggcagttgctgatcacttgataagagattcttgactcctggagtgaccgcgcttatagactgaccataaagcttctcagcccagtcaacaatgttgcttctgcttgctgagtctgccgaggctgccaaagacacattcagcgacttgatcttttttacatatcagcctcagcttcacgcaatgccgcttccacggcttcaacttcagactggttgatagtttccaacgagagaaggtacatgatggcaaatcgtaacttgtccatttgtgtacacttccctttctaaacagatagaagctcgctcttgtctatgctgctaataatctgagcccagtaatatgtacagttcaaattgatgtaaaagtttgggccaacataacgatgctcattattacatcgacatttttatctaactagtccacaatcatttttttttatgtcgtcaaaccatttcattgattttgaaagagtacaaagtgaccagagcccaaatacacaacagcaaaagcccaacaataaacccaaccagaatttgcaaccaagaaacattaggtttaattggcacatgtaagaagacgttgcttgtgcatgttgagtacgggaagatgcgagtgactcatcacaatcatttttcttcttactagtccacaatcatatgaaatgtatatatagatttatgaacacgaaaaggagattgcaggattcacatcatataatcttcacattaaaaccaaaaaaaaattcgcatcatattttaattatttttattttttaaatcacaatgttcgtatgtctaaggcttttttgcatctagctacttagagtataaacaaatacatacaaaagttagatgaaacaaaaaaagtacaacgtacggaaatatatacgataaaggttaataataaagctaaattgaaataacaatacaacaaatgaaaagaaaaagaaagaaaagaagaaacacaaaatggaagagaattgtgtggaagtttgtttagtagacgcggctactcggcgcttcgaaagacagctcaaagctgtaaaaaatgtcaaaagagaatctaattcttttagttataataataaaatcaacccctccactatctcaaatgtgtcccagatgttgttaactctttgacacacagattagctaaactagatacgcaaaaaaaaataaaaaaaatatacagtatatatatattcgctaatataaacatataaacatattgttttctgctgttaattattgtatttgctaattgttcttattaatggagaatatgaatttgctgaaaagaaatataatggagaataacagtttcctatttaaaatattttctcaacgttaattacaaatacaagatctccagatccgttgactggatatatttttgtgtaatttattgataatcttttgtgtgcgataatcagccatttttatttattttttgacatatttgcaagtcgaaaagtattttaaaagatcttaagtaataatcagtcttgaaagattttgtagtagtaaacctaaaatttaggcttaaaagtcttggagaacggtcgatatagataaacaaaaatcatgtggaactagtctatttttcttgtatcctaatagtaacattatgttataatgatttttaggattataaaactgtcggcgatgtatgtttttgttcataaatctaacttttagatgtattttcatgacaatattcgaatgagattaaaaaatatatatgtagtcaacgtgtgtttcggataattttcttcttaaactgcttgtaaaaacactaaatgattacacctcataaaactcttcgagtgaggaaaataaatcttgctgaattaaaagaggaaagaaagtgaaattggcatatggatcagacagctctgctgtcaacagattgaagcactttctctgttctgacagccaacagtttgaagtacatgcaaggtttttaaaaaagtacaatttttgtgaccgtgagtaatcaacctaaccaccatatgaaatttctgaattagcacgtatttccactcaaaaatgtggaaagttatataatcaaaacgaattggttggaacaatcgaatcctaaatatatggatgtacacacatgtacacgtaagaaaccgcagtttcaaatatactagactttttggggtgaagtgactaaatatttcctcaaactacaaaatttaggataatacgatttaatatatcaaacggtaaacactacagaacaagtaaaaaccccaaaattttgctctctagtaaaatttacatttctaggaatcatgacgaggacaattctccagaaaactctcaaaaagacgttaatttagaaaaagaaaagtttagtgacttgtagtagttgtctcgccggtatctttcactttctcttcttcgccttctctcatcttctcttcctctttggcaacactttcctcctgagaaatcaccattttaccctcgtgaccaccacacgtacactttttcatcgccggtgtcgccagatacctcggcaaatcttctccggccattatgacaagaaacttctcctcgtaagctccgttcgccgccttatctccagaccggctctctttctcttcatctacgttttgaccatcttcttcgccggaggaagacaggcgccagtaagagcaagcgaggatgagaagagcaaaggcgattagtcctagcatcgccgctaaaccgccgaagaggtaaggaaccggcgagtgccacggtgattgcggcgtcactccgtggtgattaacggaggttgacgttgccacatcttcaaacttcgattgtacgctcaatggtctcatttttgttgttgttgtgtgtaatctctttttgtttctctctggacttgtgtgttttggagataatttcttctacttttgtttttctaacttgatgtggaaaaaggaaagatgagtaggaaacagaggagaaggtaaagagatgtatttataggtatatgcaacttggggacaaagaaagtgacgatcatatttaattgatggaatttagtggaaccaactctttatttcttaaccatagtgaactcatcaacgtatctctcttttattaaagaaaataacgtatttatactgtaagaactaagaagttacagctggacaagtgaaaatgttaaatttcattcaatatatcaacagaactagacagctaacacttttatttttcattcttgaaaataataaaatacagtgatttgagagttgagatatacatagtccgtacagatagaggcatattttttgaaatcgatgtattatccatataccacgcaaaaaaaatgtttgtagctaatcagaatcagggcatagtgaaagagcagtttagattggggtgtagtggaatatgacaatgttttcacgatgataatagcgaacaaagattatttgaaagtgagtgagattgtgggttaaagtgccaacaatttcattttgtttttcttcattattatttccaaatttcatttggctctggtgctttgacttgacatatatactcattaattagtctatctttcttcttttcttgcctctagccaagactatgcggtgattccatttttttatttttcacttcttattaagagctatggataagaagatcataagtttatataagatctcattttgtttatgtggtacggtgaagcatcaatcgtaaagatggttctgtgtaatttgatgtccgattccctatagttctttagttttagtcctgtaatttttttatttttttattgcagttgtttaatatatatgtttatcagttaaatttagaatctcttttttcaccgtggaatgatccaatatccacggtaaaagaaaaacttgggttatcctttaatttccttagtttttctttacctaatttttgctttttgttattttatttttatctcacatcttgaattcttgattatactttcccactgtttagccacaatttgattcctcttcttaagaatgtacgttgatttcttttatgctttcatctttgatgctttgtttgtagagaaaattaggaatctagcattttaaaaaattcaatttgttcaaataacagatactatagaaaaatcgttgatgttttgtctatttgctcaagaatttcggcgtggaagctttggaacattggcgtaatagttttgaaaaatatgtaacgtttacttgtcaaataaatttttgtcatgttttaattcataaacttcggtcgaaaacaaaatagaatcataaaacaaagcaagaaaatgagtatcatgggactggatccacaagaccgggacatgtttgatttttatggtaattatttttaggcaatcagaaaaattgtgtttttaaaaaagcaagatagagagatatttttaaaaagatattgttatttaaaaacataaatcaaaatcaaaattgggaatttcttgtcagtgagagaataatagttttatatataaataaaaaaaatacaggtcccatctcatatgagtatagcaagtttcacaatcttcatcattaaagaactcgtgcatcgtttagaagaaaaaaagtttttacctcttttttaattctaaaacagtatcaaagttttttacaagaaaaagaaaacaataaaaaacaacaagggataagaaggccgcattgtccattggcaatcattccactaatcactattaacatgagaaaataatatttgtatagttttgttgtgtgattgtgtcccacgtttcgtcagcttccacttcgcaccttttagcagtagagggtacgttttctttctgcacggacaatcaccgctcgtcgttttgtactattcgtccctactcctctcatacatataaatggaaacgttcaaaaatctgaatggcttaaacaaattaagttcaaaaattgttagacgctacctaaacatcaaatatcctattgaatatgtattcttagtactagtgaaaatcgtgtaagtgaagtgtgggcaagagaaagatgaacttgttagttggaaattaatcgatagatgttagaccgtaccgtggtgatcgaggttacagaccatgaacctatgatttctcatatcaaacttacgagttcattacttcaaagtacatttagtgatggctaattaaagggcatttagaaaactaatacgattttttgaaacatgtaactttggtattatttaagcaatatccattacgctcgttgtttgctttactaaagggcaagtttcgtatgaggcaaggccacttggatatgaaatactccacaaactttattctacgcatatcaaaattttaattataaatatagcatgccaatctttttcctaaaacaaatctccaatatttaattgcaatttcggtggataatcggattccacttttgtacttgaacggccagttctttcttactagtaactttcattcatgttttttaatggttaaatacatttcaactataacagaaattgttggcaagaggcgaccaatcaccaacgaaagctcgtgtagattacatccacataaataattattacatgtattgctgtttatattccaactttatcataagtaatctagttaattgaagattagcgacaaaaatatgatattaaattggatgggagaaaacatatatttaattaagcaaacgaacatattcgcaacttgagtttttggggggtgtttggtgacgtacaaacttctcttcttctagataaggaactatgcactacaaattttcttaattatgcaccacaaattttctaaagtacgattaaaaaagaggaaatctaaagccaaagtagtaatcaaccctacaacaacacatgagtcacgactttcagttaactacaattatacaaatattacttgattaagtggtgttatcttaactagtgtaatgtatgtttgaaattaataaagtccatctacaaaccattttatcaaaacaaaaaatccatcaagcaaattgaagccactcttatagccgactaaccgtacctacaaattttctgtttcaaacttatgcatatctatatgggtgcttatgatacttcctattaaatttaataaaattagtaaaaatttccctaccatatatcatattattattttttcgatccaagaaagttactttttaaaatagttttctattttgtgacacttctaaaatattataagtgtatagccatttttccccaaacaaggaatagtctatcagtctatacagtatacacacgatttatttgcaaagaacctacatacacaatttctcttctaccatgttagatttttagtacttgttttactagattatgtatttttgtttgtctatcggtcttttaattttcacttgctggaggtaaataatgaaggaagtagttaaaaattgagataacatagttgtgtagaaattagaatacagtgcagaacttaaaagtatggttacgatcacattgacaacagtcgatattccattgagatcacatgaacattgcttcgttagaaatgctcgtcgatcgcctgaagtaaaccgatttgattggccaccatgttttgcctcttcctgatttcattgatatattttatttttctttactattttaaacaacaaaaaaatttagaatccgtattccaaaagtaaattaaatttttgcatacaatttttctttttctttaaaatatctaggttttaatataatattccataatttgatgaaaagaattaaagagaaagttcaaatcaatccatatagcttgtcctagcctatagccaaaaatattcctatgccgcgattgaacaaccgttttttaaaaatcgtcaaattaaatcaaacctttttccatgacaatgagacttggatatagtttacattagattctgattggcccctttgatataactaggtaaactagcttcttgaataaactgtctcttattttggttttatacaaaaaaaaaaaagcttttggaaaatgatttaaatgtaaatacataatacgtagcgtctaagaagcatatttgagaaaatatggatttatttatctggtatttatccattaatttacctacaaatggaatccaccattaaccaaaaacaaacaaacaaatggaatcccgtgaaataaagtatcatcatatacatatctctcttttatgtttttatggagagaattagtccaatccttcttcactgaatttaccacctgcttctcgtagaatatataaaactacccttaagtctttttctaatgactatgagttgacaaatgagaaaaacaaaaactgcttttgttggtcattaaatattccgtctagatggagttagtgctttcattgtcatattctttgtctcccatcaaattaaagctcactatacagcagattgtacaacactatacactaaagttacatttttgagattttattgattgacaatttcgtttcgatattcttagatacactaaactcaaatattgattttatgggaagagaataaaaaatggattgtgaaaaaggaaaaaaaaaaacctaaatttgggccatatgtgaagaatacttccttaagtttgggccatagtttaaatcaataggcccattagtctatctaacgattctttctcaactcttaaaaatctgaccggcggagatggctctgagttggaccagtcggaggattagggtttcaacggagactcactagtcgatctccgatcctttcttctacccgcccgaaatccgtcgaaacttctcttctttaccattgatttgcctcgtctcagctcaattctcttccgttgctgcttcgtttaggttcgcattatcgcttactttattgaatttttcctctatgtctctggtttcaatttcagctcaattttgtctttttttcggttgaattttctcttgggtggtatcgaattttgctcatgaatgctgtttcttgatgaatcagagccctcttagtttacttcacgtcgttcaattcaaaacttggtgtggtcttttgcaacacaaatcaggaatagttcgttacttagaaacaataatgtcatacgagaagacaaatctggaacagagaattagtaaattgagctggaaagtttcagtagtcaaaattctcgtaaaacttattttggtataattgtgtcatgagtcatgacattctttcttaggtttcgtacaagtttctaatttgaggtagatactagttcagaggttctttattaatgtttgattttgaaaacctttctttacttacagttgttgcttcgcttcagtactctggtggtgggagagatgaatcacggccaacaatctggtgaggcaaagcatgaagatgatgctgctcttacagagttccttgcttctctgatggattatactcctactgtatactttcctttgtactagttacaactttttctcggctctacatgactgaaatttgggtattgattgagttctggatttttatttttctttcagattcctgatgatttagtggagcactacttggctaagagtggatttcagtgccccgacgtacgattgtaggtatttccgacaagttatatctgatacttacaatgaaagagcagataagttgatattgaatggaatcattgttgggtcttagaatgggtgaccagtagttagatcaatggcttggtttaaatcattttggattaaggttttgccctgtttaacattcctgtaaaatggtatgataaagaagtctatgttggactagcactgaaaaagattggcaatttgaatgtaaacttcagagttcagtttgaatgcgtagaataatgaggggattcttctctttctatcaaattgagtgctgaatattggtatattttagtttttgagtttttcactcctgtcataatcttttcctgtatctattcttgccaatattctgtttttttgtttacttgtttgacaggataaggctagttgctgtggctacacaaaagtttgttgcagatgttgccagtgacgcccttcagtaagttttcattctcttcacaacgaattatcataccctttttcatatttgacttgtaattgagaaagagaagacactgcccattctgagtagatgagatgaaaagatgtctacgctagattttcccagaagctaaaagcattgatataagctcctgaataataaaaattgtcaattatatacaggcattgcaaggctagaccagcaccagttgtgaaagacaaaaaacagcaaaaggtaacatctgactcccttttgttttttttccctctgcaagactgcaacaaatatgttttggatgatgacatgaatattaatgtttccttaacaggataagcgtttggtattgacaatggaagatctttcaaaagctttgcgtgaggtaaatgcttcttcctctaagttcatgcttctggtattgttgtccctcagacctccaatgtatgagaagaaaatgtagatgtctcttgtttttttttacttaagctgcaaattactctaaatacacatggcatgaaactaattcagtatcacagaatcaacataaaatgcttagaaacatgttttagagttagtggttataatattgtgtattgcagtagtgtaggtagataggtaaggttttacagtctcgtcttaactagtagtgggaagctaactcgtgagtaaactcggtttggcagtatggtgtgaacgtgaagcatccagaatattttgctgatagcccttcgactggaatggaccctgcaacaagggacgaatagaaaccaggaattcctcaaaatctttgcctagtaaggacggtcatgtgtctcagatccctgattctctgttgtgtttcagttaaaaacaaaactcacttgtcttgctagtcctcaattactacattacatgtatattcgtttgttgtttgttctctggtgatttttggggttctacatcacttatccaccattcttgcaagtctccaagtcgtgaaaataagataagtatccatccttgtgattaactggatactgtaggattgaaaaaccacaaagtatattttccatctagcaatgatgaacctaagtgcttctgatctaacttgaaacattgccacactctgttgtatacctttagacaatccccctttgtaaccgcggcatctcaataataaagttactttttggaatttagcaattgaaaaaagctgttctgttttgttttttcactttctcatgtccgaatattctttacctagaaatacatgaaagaagacaacaatctgaaaaatctagtaacctttcgtcagcttttacaacgctacattgaagacaagaacacattggttttttcatcacaaagaaagttgaagattcttgagtttttttcctcctgaattgtttgaaatggtgaatcctccacttcagtctccgaccaatccgcatttcttccagccactacttcccggtttcgagtgtcacctcgtacacactctctctgtctctctctgtttctgtctttctttcagagtcggttttgttttaaatgttttgaggctgaaaagttaaggtaagtttcaagttttttatatgacataggtacttgtggtttctgagcacattctccttatatgtatacaggaccataaacgttgtctggaatgattctatatgccgactttttgtctgtaatatgtaaagtctctgtccaatttcttctcgcatgacttagctaaaatatcttggttttacaggagaaagagtttctatactaatacaaaatggttgaagaagcatgcaaagttggtggattttaagacttctgagttccattaatttgatactattgacgacaatcttcaaagtcggttttggctcgccgggaaaagatgcacatatggtcaagtctcgttgtaacttggaaaaggttaggagttagtaagtgtgtgtttaaaggattgcactagaatcagtgagctgtgatgatacaaaggtaactttggctacatgaagaagataaagaaaaaagttcaaagatttttagccgttaatgggatcaatgtcctcttccctgggttgtattaacacctgaggacatgttgatctcacacggctaatgtatgattcaccatcactttccatgaactttaaccacatctccttcattcgtttgccacggtagaattcgtcattcaaaataatccgattctgaatcaagaaacagatcacaaacttcaacaaggcaagggtacagacagtggctgcagcaacaaatagaagcaagaaactatcgaggctgagctttcggaaggagactgttgggtttgggtcagggttgttcattggatcaggacaagttttgtctatgttcttgaaccacgcagtttcaagttgagttgctttgttagactctgccactttcaaaatggcccttgatacatcggctactagaggcgatccaattgggaagacctacagaatcgaaactagttatatgcatcattaaaaggaaggattgtatgcaagccaaagagaagtgatggaacttacaaagccaaacccgtcaacatcaaatggcacctccaccattttatatttcttgcaatattgtccaagaaaaactctcacgtatggtacttccatgaaggctgcagaaacaccaccctttgatggtcccttgttcagaagttcttcacatttctctggagaggtaaatggcacgagtctggactcagggaagcccgattctctcagtttccccagtacgaatgaatctctctgatatgccacaggtcctccttttgcaagcacgttcttgatgctcgtttcagttggattgagctgttgtgttgtgagaagcgatgacaaactggcagtataactctgagtcagcacaagaacaatgaagtaccaagtgataaccacaacccttgctgtaaagctcattactctttctcctgtaaaaacataacttttgagagtaaacttatggaaacagactcgttgcctacagagagtactagagggaaagcgaacatactgggtgcaaaaaccatgatggagaaggcaaaccagaacatagtgctgatctggtactggggaggtccagtgaattcagagttcaccctatgttcaagaatccacacaacaaaaccaacaacaaaaaaagaaccaagggtcatcccccaaagccccggtgtcaaaggtttaaaaaagatcaaactgcttcttgccacgttatcttttagagggacaaccatccccacgcccgatgttgtgtatggcaaagtgaaatcaacataggatgatctatttgccaatatcgtcgtatctcccaccacagcatcaaatacctgcctcatagacaaggaaggtgttgtttcagagcaatggttgagttatgataagaagaaaatgaaaaaaattgaggaacagtcacaggctcaccccgagatagacttagtacgataagtcgttgaagttaccgttagtttttccatcatcatctccaaaaggaatgaatctgtgggagacatcatacggcattgcttgaattacagcctcaaagaagtcgatgcaaaaccctgttactatggtttcatgggttagaggatccgttgtaacctttacaaactgagggaaagtaccaacaggaacaccaatttgcagctctttcccgtttgttgggatctcccacccctttggaacagttaaggtaatcccaggccataagatcgggttaagatgattcttccaactagagaaagtacgtgtagttcctgaacttggactcaaatcttttaccagtcctttatcttgcgtccagaatcctaccaatattcctccaccgtctatcacattgacaatctcaaacacggatgcatgcagttgtccatcaacgaaatggtaatcaccagaaagtcctttgaactgaatctgggaaagcgagcggataagctttggaccatattctgagacactaagtgcttccaggtcagatatgtttcttccatccattttgctgaaagtcaagttagttgttcctgcttcttcaacagccattgccagtgcggtggtagcatcgtaagccctcaatccgtagatgttcaactccgaaactgggaatgcctttgccaatcttgatctaaatgtttgaagctcttccgatattggaaagtgagtccttatgcctattaccccttgcattgcttcaatatctgttccattcatcaaaaccagatgatctataactccattagtgaggatccaggcatacccttgtttcattagaccagtttccctggcttttgaaaacactcttgaagcaaggaaccgattcatatgaactacaaacactctggttggtttggtcatcaatttgagaaggtccacagagatttcatcatccgttgcattgggagaaatcaccgtcctataaggtatacggatgttaatcgcttgtaatgcatcagtaagaccaggcattataccttctccaaacgcattgttctcatacacaggtacgacctctctccaaccaaacacctttatgatctcacttatggcttgcacttgtgatgagtcgtcgtaagtagagcgaaagaagtatggactacggccagagtcaaggaaagggctcgttgcagaaaatgaaataattggcacctgagatttttggcctacctcgatcacgaaagaagcttgcatcgtcgttcttggccccagaattgctttcacttccttgttctttataagatcaagagctgcggaaacaaacataagacatgtggtgttatatgagaaacttgaaaacagaagaccaaatggaaggtagtgatgactatatctttgtggagctgaaaactatcaagttctatatagtttagagccgaaataaattcattgccatgaaaatgcagtactgaaggatgcattgtccacaatataccacaattacatttaaacttatgtaaacaataccacaagaaaatatatatgaatccctttatatatatgtacgcatgccaagacgtcatttcacgtaaaaacgatattcaaccgttttaacagaaaacgtacttttgcggtttttgacaacaaaaatgtgactaatcggttttaaagggaaaacatgtgattgtgcggttgttgatgaaaaacagggattatgctttttggagagaaaacatgattctaaaatatctaatttttcatactgaattaaaaaacgaacaaccctatatttcatattctcaaatttatccttccagccaggaacatgttacacgtgtgcatatatgatgcgcataattagtgtgaataaggccacatatgatacgcatatatgatcagttgttccaaaaaacaatattagcggttgcatgaacgagaaaacagaacccacaaggacaattcacatttcttgagctatactatatatagttagtataacgtggaaacggaaaaaataatcacaaacgaaattttttgctttcatttgcgtttcacgtttacttatagaaacaatcgaatcattaaagacagaacataccagccgctgcagcgccaacaacatcgtctctagagtcggcaaagttaagaagaagcctggtccgagattctggacgagaagagtaaaagtctgagagagacatgttaatggcgagcaagctcaagttggaggcagttgtcccaacatcagtcacaaccccaacattaattacttggattgtcgtattctgtcccttccccaatttcacgccgaagataaaaacgagaaacactaagacgacgtcgttgagatgtctcttcatttttcttttgtttttggttttggttaagtaccgtggaatgtatacatcttgaaaatattttgaactcatatttataaatggataagatttaacgccaaaaggtgtttggttcgaagaagtttttgtttttagaagtaaattatacatattaacgaccctttctgctaatgacgtaatataaaagttacatttccataagaaacattcttttcttttttgtttaattgaagatataaatccttacatcatctcttgtcaaaaaccagcatacaataaagtacttatcttattaaactattaaataactaataatatggttgaaattttaacaaaataggtttttattaattaaccagtactggactaacgtacctttgcaaaattaactttttttccattttaacttgacaagggcattattggacctccctacacacgcatgcatttacatagtagacgttataactcccatgttaacatattaaactcatatcatatgttatatgtgccacaaattaaatctctgctcaagtggccgcaaatttcagtatctcatattttctgttctaacttaaaagttaacacggttacttttcattcctcggtctcaagtctttcgtgatccatccagttttgtataaaaacacaaaagtaacaaaattatagatgcagcaagtcgcgggtagtggtgaaaaataagtttcatcagtaaaactaaataaagaaagcatatatatatgccttttgtaagtgatatcatgcaaccccgtttctgattaactaatattacagaactagatgtaaaaagagaagacaaatatattttacttatctaacatacagtttttaagttttgatataagaaaaacattgtttaattaacaagacgaatgtagtagtaaaagacattgcagtaaggcgtaaccacgtagtattcattcaccatcacccgtgacccgaaacattttattttatatcgttgaaatgacttggtttgtaaggaagagagatagtcaaacaacaaaaagaaagaattagtcagatatcgtactcccggaaaagaaaataaaaaacgattccgtgattgaaacaggttgcttaagagaataatcattggcagaaatttgtttaacacgaacttttttaatcaaggccaagttgcaaaaaaaggtcaaacaaaattacacattattttgaggagaaaaggtttatatatatatattttttatttttttttgaacacggaaggtttatatatatatatatatatatgtatcaaattttcttcaaaataaactaatgctatgttttttctgtttgaaattattatttcatgaatttaggaagaagaaaatgataaaagggccatcgggcccataatcgcagaaaacggcccatataaatccaccaaacgaatcttctctcttggtataaatatgctgtcttgcgttacagagaaaccctagacgtcgaagatgaaggtgcgtgacggcgaaatcgaatagactctacatttgctcgtattcgagtttcctttgctaacctttttcatgtttcttcgtttcagttcaacgttgcgaatccaactactggatgccagaagaagctcgagatcgacgatgaccagaaactgtaagattttgcttctctgtttcatcttcattcatttttaatagatatttcgtgctaggttgccagatctattgattggtgtttgtatatatcactgttaaattgataggtctagtaaacagtaattgtcaatttttctatgttcgtcttataagcttaataagagttagaatcttcttctatgtttaatacttacattaaaataagtttcgtatctgctcataaacatatctggattatattattcagcttgatttatgttgatgcagacgtgcgttttacgacaagagaatctctcaagaagtcagtggagatgctttgggcgaggtacagattccatttttcttactttgatctaatgagtgtgaagattagcatttcgaagcagatgatgatgttttgtttatgaattgttgttattgcaggagttcaaaggatacgttttcaagatcaagggtggttgcgataagcaaggtttcccaatgaagcagggagttttgactccaggccgtgttcgccttttgcttcaccgaggtaactaaacataataccttttcttacacttttgcatctataatggatttgtatttgtgtgtgtgtgtgttttgctgtagattaacattgtttcgtaatgggtgaacaggaactccttgcttcagaggacatggaaggagaactggtgagaggagaagaaagtctgttcgtggttgcattgtgagccctgatctctctgttctgaaccttgtcattgtgaagaagggtgagaacgatcttcctgggcttaccgatactgagaagccaagaatgagaggaccaaagagagcctccaagatccgtaaactgtttaacctcaagaaggaagatgatgtcaggacctatgtcaacacttaccgccgcaagttcacaaacaagaagggtgagacactgaacttgagaaatagtggtttctgaatcacacttgagaaataatgttttctgaaacttgtttcttctgtttggatttttgacaggcaaggaagttagcaaagcccctaagatccagaggcttgtgaccccattgactcttcagaggaagagagctagaattgctgacaagaagaagaaaattgctaaggctaattctgatgctgctgattaccagaagcttctcgcctcgaggttgaaggaacagcgtgacaggaggagtgagagtttggcaaagaagaggtcgagactctcttctgctgctgccaagccctctgtcacagcttaaaaaagcttgagaatcaaatcaaagatgtcacctttctagttttgttctcttttcttctccggctattaaaaagttagttcgagttcatattcagctgtttttgttccaagacatgggtacacaatcgctttgggcttgtttcatgatttatgcttttagttgaagaccattttaaactcaatttttattgcttatctttctcagtttttgatcaaagcgtttctccattgaaaaccattttaatcacctgtttcaatcatacataatgttaaacacatgtactggcgattacaataggtatatattttgactgaaatttatggagcattgtatgacggtttgataaatttctgagaaaactcattcttaagttttaagattatctcaacaactggtgaatcaaaactgtgatgtgtggtttgggccaaacgacccataaacgagttcaacttaacagagaaagaacaaaaacaattatatatgttgacagagagaggtaacacagcaaaggggtggtggcgcagttggctagcgcgtaggtctcatagctattgagtgatcctgaggtcgagagttcgagcctctctcaccccatatatttttgtcctcttcaaactaaccttaaactcacgtttctccttttttccttgtcacactgaaactgaatcgtttttttttctttgtcgactgatgatatatctagataaagagtttcagaaagccaattacaaaagcatcaaaaacacaaccatgatgctctaaccaaagcagccaaacttacaggcttaaacaacaagccaatatacaagatcacaaaaaaaaaaaaaagaaatctcgttaggctatcttttgtgatttagattttagttttgttttctatcaaaatgtactccctctattcctaaacttcaaaagtctttagtgtcagtgaatggtgttgtcaagtgaatggtattgtcacatttttttatattgttttttattaatctaaaaaattctgatatttgaaagagattttgtcttttgtcaattcatttattgtgaaatggcgtacatataatgtagacaagaatctcctttgtattttattacattaagtcaccgagaaaacttttgggcttttggctttgttagagtgatcggaatggcgaatgcatcacccttgtctccgactaaccaacacttcttccagcctcttcttcccggattccagagcaacctcgtacgcaatctttctttctctcaatctgtctgaacataacatatagtctcatgatggttctgtttctctgttgcagaaaattcctgtgaactacttctctgagcacatcgagggaaaacacgaaggcaagactgtaacgttgagaacagatgcgtcggagagaacatgggaagtaaagatggagggtcatagactcacggaaggttggaaagagttcgttgaggcacatgatcttcgaatcggtgactttgttgtctttagacatgaaggagacatggtgttccatgtcactgctttgggacctagttgctgtgagatccaatacccacagtctagcagacatgaagaaggcgaagagagtggtgaaaatggtatgaatcatcattcaatgaacctttatacatttatcttaggctattcttgaaacgtttattttctgattcagaaatatccgagaaagaaggtgaagagaatgtgcaaaaagaatctgataagtcttcatcagatctgaattgttttagccaatccgtgacgcattcaaacatatcaagagatgcagtggtttgtcggattagcggtttctttgtttttttctatgtttatatcagtcctaatgcaatttgatgactgatgcagagtgtgccgagagatttcgtgaagcgaagtggttttagtaaaggaaggcatgagatagttttgatgaacgaagaaggaaagtcatgggaatcagaagtaaagagttatatgtctggtgcggtttatttagttggaggttggacaactttctgcaccgaaaataaattagatgttggagattcttgcacattcaaactgttgcaaaaggcgaaaacgcccgtgtttcagctctgcagccgcacaaaggtggagagtatgaacataactggagaaagcaagtttgtgaagttaactcctacaccaagcagccttgcgcttggtaaaaggtgacttttggaaacctctgtctctggtttcttcaatgcactgactgtctttataattctgaatatttttgcagcatctaccgttaagtttcacgaaagtgaatggactcatcaatccagggaagataattctggtggacaaagacagagctgagtggtcgatgatgcttaaggttgatagtagaggagctgtgtatattattggtggtaatgactggaaaagtttctgtgccgcaaatgaagtaggcgcaggggagtcactagctttggagttgatccaaggaggtgtaagtcctttgctcaagttctgctccaaggtcagtaagaacgtcaaatagcttgcaatccacgttttaggttttgctaaatcaaataacgacttgttttcagatggagcaaccctcattcaaagcagaggatgggagacacaagagagctcgagtccaaaataggagccaggaaacagataagggagcagaaacttctagagcatctacaatgggaccgaagcttgagataactgaaaaaggagaaccctctcgagcatctacaatgagaccgaaagttgagataagggagaaaatagctgaaacgggagaaccctctcgagcatctaacaaatctagtggtattgaaggaaacttgcagcacacgaaaccttgctcagtcaaaacagatcagttggccaaggtgaaagagagcgttgtagatacgttaactagtatcgggcggttccaagcagagctcgagacaatgaaacgtaaactagaagattcattgcaggaactcaactagctaggtccgatctgtaatttgatacgttgttattattattattatatcaatcttttaggtttggctttactcaaatttctaacaattttttaacttggcacagagaaaggagaagacaacatcttccaagtaaaataatcaagtttaaatgtgaaattgaagaccctataattttattctatgactttgtttaagatggagttattttatttttcccttttcatttcagatataatgggttaattaaacattattttgccctctttcaagtctcatgaccccaatcctttttgtcctttttattcagattttagttttgttttcaattaaattgttctccctatattcctaaaacaatgatttttctctctctctttttgttctataaaaattaattatctacattttctatgaatcttcttcttttttttgtttagtaaaaatctctatgaaacttacaaaatgttaataaaatgtaaactttaaaaaatattaattgagaatatctaaatttctattattatagttcatagatatgggaaaatgcttagtatgagtaacttgtgaagttagaattcattaattgttttgtgtgaaagttttagaacatcattattatagaaacataaggaatatctttaatcttgaaaattttgaaacttcaaaaaaatgaaagtcttttaaaataaatcattgattgtatatttgaaattatatgaatactatggtccaaagttgtagaaaacatatagtgtttaatatcagtgattcagtgaatggtgccttcataatttattaactgtttcttaattttgtgtgaaagttttagaaaatcattattattggaacataaggaatatctttaatcttgaaaattttgaaactggaaaaataaattaaaatcttttttttaaaaaaaaacattgattgaaaatatttgaatttagttatatgaatactattggttcagagttatggaaaacagaaaaatgtttaatgtcactgattcagtgaatggtgttgtcataatgtgtcttaatttatgtgaaacttttacaaaaatcattatttttaagaacaaatgaagtatctttctgtagaaaattttgaaatttgaaagagattttcatctcaattcatttattgtgaaatggttatataatgaagtagacaagaaagtctattccttgtattttattacattaagtcgccgagaaaacttttttgctttgttggagtgatcggaatggcgaatgcatcacagttatctccgacaaacaaacacttcttcaagcctcttctccccggattccagagaaacctcgtacggaatctctctgtctctgtctttctctcaatctgtatgaacttatagtctcacggttctgtttctctgttgcagaatattcctgtgaagttcttctccgagcacatcgagggaaaacacgagggcgagactgtaaagttgagagcagatgcgtcgaagagaacatgggaagtgaagatggatggcaacagactcaccgaaggttggaaagagttcgtggaggcacatgatcttcgtatccgcgacttcgttgtctttagacacgaaggagacatggtgttccatgtcactgctttgggacctagttgctgtgagatccaatacccacagtctatcagccatgaagaaggcgaagagagtggtgaagttggtatgattgaatcatcattcagtgaccacatttacatttatttagactcttttctattcttgaaacgtttcaatttctgattcagaaatatccgagagagaagttgaggagaatttgcaaaaagaatatgatcagtcttcagcagatctgaattgttttagccaatccgtaacgcactcaaacatatcaaatgatcttgtggttagtcagattaacggtttctttggtgttgttatgtttatttatagttcaaatctgtgtgagtgtatataagtcccaatgcaatttgatgactgatgcagactctgcccagggatttcgcaaaacgaaacggtttagacaaaggaatgcatgagatagtattgatgaatgaagaaggaaagtcatgggaatcagaagtaaggagtagaatgtctggtcaggtttttattgttggaggttggaaaagtctctgcagcgaaaataaattaaaaggtggagattcttgcacattcaaactgctgcaaaatgcgaaaacgcccgtgtttcagctctgtagccgcatcggagaaagtcggtttgtgaagttaactcctacactaaacagccttgagattggcaaacaggtgacttttcgaaacctctatctctggtttcttcagtgcagtgtctttttaattctgaatacttttgcagcatctaccggtaagtttcacgaaagggaatggactcatacatccgggggagataattctggtggacaaagacagagttgaatggtcgatgaagcttcaggttgataatagaggagggatgcatatatttggtggtaatgactggaaaagtttctgtgccgcaaatgaagtaggcgcaggggagtcactaactttggagttgattcgaggaggcttaagtcctttattcaagttcttctccaaggtcagtatttcaaatagcttgcagtccacgttttaggttttgctaaatcaaacaacgacttgttttcagatagagcaaccctcattcgaagcagaggataggagacacaagagagctcgagtccataatgggagccaggaaacagataagggagaaccttctcgagcaactaaaatgggaccggagcttgagaaaagggagaagacagctgaaaaaggagaaccgtctcgagcatctaacaaatccagtggtaaacaaggaaacttacagaaaacgcaagcttgctctgtcacagatcacgtggctaaggtgaaagagagcgttgtagatactttaactagtatcagacggttccaagcagagcttgaaacaatggaacagaaattagaagattcattgcaggaaatcaacaagttaagttaggtatgatctgtaatctgtaatattatcattcttataacaatcttttagtttcggttttggttttgttcaaatttctaacaatttgaatttggcacagagagaggagaagataacatcttcaagtaataatcaagtttaaatgtgaaactgaagactcttgtaacctctgtttttattatatgactttgtttaagatgtagttgttttattttcccttttttcattttgttaattaatcgtaaagtttataatgttcttgttctctgttggcggactaatgtcgtatttccataatatttattaattagtatctgataagtgataacaacttaaaatggttttttttttttccttatctgcatcactgcattgaaatggtaaacaaaaaatgactttatctgctgcaacaagccatagccaaaaacaatacaaaaccaatatacagtagttttttttttttttttgtcgtaaccaatatagttttattaaggaaaagaaaagtaatcatagccaaaaaaaggaattattacaaggtaacgacaaaaaacgtagttgaaaaaggaaaacaaaaaagcatataaaggcccaatctttgtaattgcattggaaaggcccaaacccaacaacatagaacactgtcttctctactaagtaacaaaaatcaacgaagcggtaattcttgaacagacaaagaaaaaaaaaaggtgaatacttgaaatatataaaagatacagaagacacgagaagggagaagagatcgatgattttgagaagcgaattagatgcatgaggttggttttccgttggatctctctgtcttcactcgccttatagcgactctatttttcctcgccgttggtgttttttactttctcaaaaacaccgccgctaagtacttcgacatcggagccgccgccgccggaggtttcgacagggacttcatggcggttgatgctgaggattgctctgtctgtgggaatttttccaccaagaaatgctcccgctgcaaatccgttcgatactggtatgccctcaaattcagtctctttgttgggatcatctcgagcttagcgtaattgaaagattgatttagtttgcttgctttgagcttgcgatgtgtaattcttttcaattttcaaagtcttgagcttttcaatagaagaatcatgggtttggaagttgttgcttagatacttttgtgaacttaatttgtatgagctcagatagtttggattatcttggtgtttcttcccgcggctttgctccgagttttcgctagtgttcaattgatgtttgagctgtgatgttgtttctttattttctgtagatttctttgttcagctacttgttttctttgtaacttctctcacaaattcgaaaatggtataaatttttcacattgttacccaaaaaaataaaattggttttagtgcatattttcgaaattgagtatctttgtctgaatggtctgtttgctatcagctcagcagagtgccaaaggtcagattggagttcgggtcatcaaagaaactgcagggattatgggattactacattaacaccatctgcaaagaatggcttaaggttcagagcttctccattcggggatagttctgcgtctagtattgcactgatttccgaacggggccaaaacaagagtagtctcaagccaagagaagtaatgtgtcttctttttcctcatgttgacactctcttgatagagtctttgtgttaacttgtacttttgttttgcatcttctgcaggttctttttccatatgaagaatttgttgaatattttaactgggacaatccagaattggctccctgtgggctcatgaattgtggaaataggtttgtgttcatctactttctagtatatcttaacagtatcagttgaaggaatggattttttttttctcccttgaatatgatcttctttactcctctttcagttgtttcgccaatgtgattctacaatgcctttcctggacacgtcctcttgttgcatatctgctggagaaaggccacaagagagaatgtaaaacttctttcttttcatttttgcactaatgcttcaaactctttcgtttgtggttttctgtattcgctttagctttgattctacgttttgtttgacaggtatgcgcaacgattggtgcttcctctgtgaatttcaaacccatgttgagagagcgagtcaaagtcggttccctttttcaccaatgaacattatttcacggttaactaatattggtggaactcttggatatggaagacaggaggatgctcatgagttcatgaggtcagtatctcttgctcatgaaaatagctaattcctagtggtgtttagtctgtgaatctcccaactgatggatttatacaactcacatactgcaggtatgcgattgatatgatgcagtctgtttgccttgatgaattcggtggagaaaaaatagtgcctcctcgttcacaagaaacaacacttattcagtatatatttggaggtctccttcaatcacaggtgatatttcctgatctaaatatcagatgtccatctattaaggcaagcgagcaatagatgaaattccactctctagaattattgggatcttacgaaattccatgttatacatatacatgttagaattcaacatgctacttattttgtctttagctggctgcctccattgagaatatatgtaacttgatttcagttgataaaaacgatcaagatccttcctgtgataaacttacattaacttctaatgttcctctgtgtgtggagctttttccctgatttgctgcattttcaaatttccaggttcaatgtactgtttgcaatcatgtttctgaccaatatgaaaatatgatggatctaatcgttgagatgcatggggatgcggggtctttggaggaatgtcttgatcaatttacagccgaagagtggcttcatggagataatatgtacaaatgtgataggtataaaagctatgtttcttaagcaatgtgttagttgattagttgacaaattgactaagtttcttaaacccgatactattctttctgtccaggtgtagtgactatgtaaaagcatgtaagcgtcttacgattcgacgcgctccaaatattcttactattgccttaaaaagatatcaggtatttgtggcattcccctaccttttgctagattcttcttggaagaagttgtctttaaaatacatctgtgaaattattatgtacagggaggaagatacggaaaattgaacaaaagaataagttttcccgagacattggatcttaatccttacatgagtgaaggcggagatggatcagatgtatataaactctatgcagtgattgtccatttagatatgctgaatgcatcattcttcggccattacatatgctacattaaggatttttgcggaaactggtatagaatagatgattccgaggtaacactcatttactttccgctcttcttgttagcatgaaattgtgatgattccataaatgttgagcaatctctaaccgtaatcgaaaatactctcagatagaaagtgttgaattagaagatgtcctttctcaaagagcttatatgctcctctacagcaggtaagctgttatttcctcctgtcttttgttgttcagctctccgtgtaaatctaatctataaccacaagattgagggtgtttacttcatcattaagagttgcgtaaattgattgtatatgatgaaaaatataaacagactaatgttgttgagcttgtgagtttcttatgtttctctgttgtcatgcaggattcaagctcggtcgtcatcttcatgtcttagatcagaagttaaagacgagaagaaaacagacacattggacacagaatcttgcgtaaaagagttagttgagagttcaatggtaggagctattgaaagcagaagcagcacccatgcgaccattgaagaccctgtatgcgagcaatcaccatcaccatcgccatcaccatcaccatcaccatcgccatcaccatcaccatcagtattggcctctgaatgttgtagtgaggttgaaaggattgatacattggattccgagtccaactcttcgattgatgactctgcaacagatcatcaagaggatgtagcaaatgggaacaaagatccagaggtaaaatatcaggctgccgattcttggtcagaccctacaacttcaactccattggtctgtacaaaatccaaacctccggtgagagatatggacaccaagatgatcgacgctcagtgatgtggtatgttacaacatttgaaaatcagcagagctttttagcttacaaagttacaatagtgatgtagatactattacacaatgacttctatggtaataaagggtgattatacgtagaatttaaatgttcgtgaattgccatattgtttgccattcatgtgacagactcatttagacccataagtaggtaaatattttgttgacttaaatagacgcattgactcttacctaaaaagttcataactacattagattcataccacataggtgatgaattcaatataaaagattatacttgtgaacaagttggatgcaaattagagtcaattcttggccttggagcagaacttgagcataggaagagttgttttgtcttctcaaaccaactccaacacaaaagatttgcatgcctcgatgccattagccttgaaaaactctttcaaccctgaaccgaatcgcgtctgtgtatttcccttgtacatgactaaattcactggccactctactccatgcttgtccaacagagttatcttcttcattcctaggttttccattcggttacccttaatgaatttgattggaacacgctgcaaacaaaggagaatataagcttacactaactaagtgaactttcataaagcattgatgataaccaaaaccaagggaacaaaactcctcctagagagttgttttaacttacaagtctaccatctttgagagcggctggtgtgacggttagtgtcaaaaatcggtattcacttactgaagatgacgatgatggaactttttggctactgtcaccagattcctttctctttattttgttgaaatctttagtggaaacactctttaattctgcagtggagaaacgaagaagaggcgttttggtgttattcctctctagtttaaacgtgacggaatctccaggtttaagcccatgctcatggagaaacttgtccagccacccctcatgtaaaacgttctacttgaattcctaaacttcagaataagcgtccatgtccttgcttcttcattcatcagaacaatcttgttacttcctttaatcagaccatcggacctatcaaacttccttggaagaaactgcaaagtaaaaaatttaaacatgagtaacaacttccatatctctccaaaggaatcaacaatagatctgaagtaccaaccagtgtatcctctcgtaagttagaatctgttacatgtgcaacgaaacaggacttgtctgatgaaaaagacttggcttctgcttcaggaatcctcttcttcacatgtttttttcttggaaactttcctatttttataaaagttggaaaagttagaccatgtagatggtgttaaaacgccaacaaatcaagagttatttgtacattgacttacccatgttaactttgtcttcgtcgagtgaagactctagttctgtttttatgctctgcttcatcgacaagttacctgcatcacaagaagaaaaaagttagaatcttcaaaacaaaatgtgaatttcctgggaaggtaaaaacagaagacaacttactaatgttctcctgattattgcaagacggtacatattgaatctcacagcaactgggtcccaatgcagtgacatgaaataccaaagatccttcgtgtctgaaaacgataatatccccaactcggaaatcatgcgcgctggcgaactctttccagcccactgttagtctccgaccttggatcttaacttgccaagttttttcagacgcgtcggttcttagctccactgtccttccttcgtttcttccttgtatgcgttttgagaaaaacttcacaggaatgttctgcaacaacatgcaaaagagattattaaaacgaaaccatctctctcaacataagctgtatttactcgtataagagagtagtacaaggtaagagtcgaagccgggaagaagtggctggaagaaatgtgagtttttcggagattgaagaactggatccgccattgttcaaaagatttagataaagcgtttccaagaaaagaaagccctagaaaacaaaacaaaaaaatgattcagtctaagtttatgagtgtcttttactcttttggtaatcctcgcatggttcctcttattaatgagagctccagctacctgtttcattaatgaacactccttttattctcttttcattaaatgagtcactactttttgttcttttggtgaaggaaaattcattaccaaaaaaagattggtgctaacatctcgtttactgatttggtggcattgctcctttttctttattttctatttggagatataatctagttttgtggcttttgcattagctgaggcagagtatagttatctatatagtgtaagttagttttaagagaaatgtaaacatcataacaggtttgtgcatcagaataatcaagaaccaaccgaaatggccagttagagtaattagcgttttgatcaattgttatgcagaaagcttctaagctctaacttacgcagatgatattacagaatagtgataatagatagaacttatatattgttattacttgttttcaagacccttattagagtaaatgttgttgacataaatagaaagactacactggattcatactgcataggttgtgagctcactaaaacagaccattcttacttataataacttgggtgcaaattagagtcaagtcttgatcttggagcagaatttgaacataggaagagttgttgtctcttcccaaaccaactccaacaccacagattcatatgccttaacgccaatagcattgcagaattctctcaaccctgaacccaaaaccatccttgtatatcttttatccatcagtaaggtcactggccactcttctccattcttgtccaatagagttatcttcttccctcctgccctttccatcttgttaacactaataaacttcttcgaaagatactgcaaagaaagggagacaattagcttatatactctgtgcacttcacaaagcatcaataccaaaaacaagggaacaaaacttacaagtctggaactgcggatactggatggtgtgacagttagtgtcagaaatcgggtcctatcttttgtggaagcactctttgattctgcaatggagaaaaggagtagaggcgtttttgtgttgctactctccagtttaaacgtgacagaatctccaggtttaagcccattctcacggcagaaacttctccagccacccctactgtaaaacgatctacgtgaatccctaaacttcagaataagcgtccatgtccttgctccttcattcattagaacaatcttgttacttcctttaatcagaccatcggacctaacaaaattccttggaagagactgcaaagtaaaattttaaacatgagtaatcaaccttcacggctctcaaaaggaatcaacagtagatctgaagtaccaaccagtgtatcctctcgtaggttccaatctgttacatatgcaacgaaacaagacttgtataatgaaaaagactttgcttctgtttcaggaatcctcttgttcacatgtttctttctcagaagctttcctgttttcacaaaagttggacaagttagctagaccttgtagatgttcttgaaaatcaacaagactcatttatacattgccttttacccatgttatcaacgctctggttcaccttagccacatgatcaaagataaagcaagattgcgtttgctgcaactttccttgatcaccagtagacttgttagatgtgcgattgcgacgagaaggttctccttcttcagctatcttctccctcacgtcatgcttcgatctactctcttggctccatctttggactcgagctctcttgagtggccgagcctctgctccagcctttgggagcttgctgcagagccgaaacacgggcattttggcgttgtgaagcagtttaaatgtacaagaatctccaacttctaatttactttcagtgcagagacttttccaacctccagctacaataactttaccagacttataacttataacttctgattcccatggctttccttcttcgttcatcaaaactatctcatgccttcctatgttgaaaccatatcgctttgcgaaatctctgggcacaccctgcatcagtcatcaaattgcattggggattatatatactcacacatacttaaactgtaaaatcaatatatggaatatagtaacaactaactaaccactgaatctctcattaggtttgaagtggtcacagattggctaaaacatgttagatctgatgaaaactgatcgggttctgtttctatattctcctcaatttctttctcctttcttgaagattcccctgaagcagaaaattaacggttcacaaatagtaaagagtctagataaatctaaatgctcattgaatagttttaccaatttcatcactctcttcgttttcaccgtgactacaagatggtgcgtattggacctcacagcaactggatcctaaagcagtgacatcgaagaacatgtctcctttgtgtttgaagatgacgaagtcactgattcgaagatcatgtgcctccacaaactctttccaaccgtcggtgagcgtatggccctcaatcttcactttccatgttctcttcgaagaatctgatctcaattttacggtctttccttcgtgtttccccttgatatacttggagaagaacttcacaggaatgttctgcaacaaacgaatagaattgtgacatgagtctatatgttcagagagagagaaacagagagattacttacgatgtggctcttgaaaccgggaagaagaggctggaaaaagtgtggacttttaggagaaaagagtgtcgggttgttcattgccgatcacttcgaactaaagatccgaaggttgttgttgttcttggggagattcacagaaagtttagagcttttgagttgctttggaagagtactctgttttcttttaaatccaataatgcaaataagtaaaaagatatgttgtactcttttggtttggcctacttcgaagtcttctgacatgcaataatagaaacagtatgggatcctcaataaagtcaactatgtgaataaaacttacagagaattaacgtacataatttgtttaagcacagacttataaacagagtcttcattagtctctgttatttaacttatgaaaaaactaactaaatcacataaagcagggaataaattgaccaatcttatgcatgttaattaaatggttgacaaaaagataaatcactatgttaactgtttctattagaatgtatgggtcaatatataaagtttaatgtaaaagaaataaatcttctgtatataaaaaagaagaagtaacataataaactcattacatttttctaccaatatctctagatataaatgtaaaaaaagagttgaaaaaaaaaaatcttgatataaatgtggtaactaaatgaatcaacaacataaagatccaaatgtggtaactaaaccgtgggtcttgtgtttgctgggttatctatctcattctttgcctccgtccatcagcaggtccggatcttctctccggtgaagcattcgacttttccgtttaaccctttttgtggctgttttctgaattgtatttgttcaaggccaggcccattttctgggaagcccaattctataaatatattttagttaaaaaaaaaaaaaaaaaaaaaaaaacaaacaaacataaagatccaaataacttaatctttacaaattagaaggttacaggagtgttctgcaaaaatatgaaaaagagtttttaaaacgaaaccacctttctcaataagctaatgctcgtagaaagggacagagacagagtacgaggtaggagtcgaagcaaggaagaagaggctgaaagaaatgtgggtttgtcgtagattgaagaactggatccgccattgttcaacaaaaaaatgactcaagtctaagttaaagatcagtgtcttttcgttatcatctcatggctcctcttatttattagacatcccgctacctgttttaatgagtcacaacatttattttccattaatgagtcagggaactcagctagtatttatggcctctgcattacctgaggtggagtatatttctagtgagtactatattggtaaaagaatctaaacatttaacctttttgttaaaagaaaatctaaaaactcttactgaagaaaccctaaaataaattaaaccctaaaacgaatgtgctttcttgatcccccattgtagctagtagtttaatattacgtgggagagtgctataaaaagtccaacctaacgctccatacatgcgtagatcatgtttcaaatcataacttagttttcgtttcctgtaacaaagcttccaaattatgttcctttgtctcgagtttagcccggaaccgtctaatactatttaaagtatcttcaacgctctgtttcaccttagccacatgatcaaagataaagcaagattgcgtttgctgcaacttttcttgatcaccagtagccttgttagatgaccgagtgcaacgagatggccctccttcttcatctaacttctgcctcacgtcatgcttctgtctactccccccgctgctactttggactcgagatctcttgtgtggccgagcctctgctccagcctttgggcggctgcagagccgaaacacgggaattttcgggttgcggagcagtttaaatgtacaagaatctccaacttctaatttatttgcagtgcagagacttgtccaacctccagctataaaaacccgaccagacttgtaacttttaacttctgattcccatgtatttccttcttcgtccatcaaaactatctcatgcctacctatgttcaaaccatatcgctttgcgaaatctctgggaataccctgcagtagttatcaaacacaaacacaaacacagtcacacatactcaaactctaaaatcgatatatggaacacaatcataactaactaaccactaaatctctcgttaggtttgaagcggtcacagattggctaaaacatgttagatctggtgaaaactgatcaggttctgttttcacattctcctcaataattttctcatttcttgaagattcccctgaagcagaaatctaacgcttaacaaatagtaaagagtctagataaatctaaatgctctctgaatgatgattatgttataccaatttcatcactctcttcgtttctgtcgtggctacgagatggtgcgtattggacttcacagcaactgggtcctatagcagtcacatggaacaacatgtctcctttgtgtttgaagacgacgaagtcaccgactcgaagatcatgtgcctccacgaactctttccaaccttcagtgagtttatggccctccatcttcactttccacgttctcctcgaaggatatgatctcaaatagacagtatttccctcgtgttttccctctatatgcttggagaagaacttcacagggattttctgcaacaaacgagtagaactgtgacatgagtctatatgttcagagagagagaaacagagagattacttacgatgtggctcttgaaaccgggaagaataggctggaaaaagtgtggactttttggagcaaagagtgtcggattcttcattgccgatcacttcgaattaaagatccaaaaagtgttcttggggagattcacagaaattttggagcttttgagttgctttggaagagtactactctgtttacttctttaattttacaattctacttaaatccaataatgcaaaaagcgaaaagatagtttttactcttttggttttgcttacttcgaagtcttctgacatgccctaatagaaacagtaatgggatcctcaataaaattaactatgtgaataaaacttacataatttttgtaaacagtgtcttcattagtctctgttattcaacttatgaaaaaactaactaaatcacataaagcagggaataaattgaccaatcttatgcatgttaattaaatggttgacaaaaagataaatcactatgttaactgttgctatcaaaatttatctgtcaatatataaagtttaacgtaaaagaaataaatctgttgtatatgaaaaaagaagaagtaacacaataaactcattacatttttcttccaatatctctagatataaatgtaaaaaaagggttgaacaaaaaaaaatgtagatataaatgtgttagctaaatgaatcaacaacataaagatccaaataacttaaactttacaaagaatatatgaatttttattttgttgactcatttaattaatacattaatagtttgatatcagttatgaatgaacaaaaatttgttattgaatagtgttgatttttactatatagatatcaaatagaataaaataaagtttttaatcctgggaaaaaaataatcaaatcaaacgattagatttttagaaattgggttgaaacttattcttctgacttacttttcagtcctacatcgatcaaatcagaagaaaaaaaaaagccttcggttattaatgcgtttatcaagaaatatctttgtcattaaataattttgttcaccaagtcattatttagtttttttagttttttttttaacacagtcattatttagttaatgacaataaatcaggtgtttaatgagaatgaataacggagtttagactttagattataaaccttactataacgccagcgaagaataattcgaagaggcaaattttcagagaataattactttagctgttcgacaatggcggatccactgattccctccccaaccaacaaagctttcttcatcatagatctatctggacaaaaatccaatcctgtacttttccactgtctctatctcatcgtctctttccatgtctctgttacaatgcatcaatcggttctgtttttcttaattgttgtggttgcagatcattcctactgagttcatttggaatcacttcaatggtaagattcagtcaacgaatatgaaactaacttctgacgcttcggacagaaactgggacgtgaaattggacggcgcgagattcgccggcggatggaaagatttctccgtctcccactctgttagagacgacgaccttttgagtttccggcacgacggaggcatggtcttccacgtctcacccttcggacgtagtttctctcagatacagttaatctcttcttctacctctgacgatgatgatgatgaacgcactgtttttgatgatgatgaagacgacgatgtaggagatgatgatgacaattcgatatccgaagatgatttttgttcaaagaaaatttcgtcgaagaagagagcaagaaaagaaacagagtcttcatcagacaaatcttatcttgttgcacacgtcacaccttcaagcctactccgagataatatggtgattactacttcgctggaatctttaatacaattctcattctattcttttgctacaatatatatgaagttgtgattttgcagtgtgttttaagcaaatttgcaaggtcaaatggtctggacaggagagagtgtgagattgatctgagggatgaacatgaaaaatcttggactctgcttttgagacacaacaaaaaaactggtcaggcttttatgcgtggaggatggagaagtttttgtcgtaataacgggatcaaagctggatctatctgtaggtttaagcttgtccaaagcggaataaaacctgtgctacagctgtgtcccaacgcctctagcattccagaaggaaactcttccaaagcaagaaaaaaacgaaatgtttctgaaattgaaggtgatgagatagaatctgagaattgctcagagactattccattgaatcagaacaagattctgacgtttgatcttaaaccttacgtgttcaggtcatgtcaatttgtaagttttcaagacctttgttctaggtgtttttcaagtctttttgtgttgtcattcgcttaaatgtgttgaaaatgtacagtttcttcctgcatcgttcgcaagagagaacgggatcgtggaagcaggagaggtaactgtattgaacaaagatggcatagagtggaagtcgcatctagttaacatcaagggacgcgatcagttttacaatagaggttgtcaagatttctttgtagctaatggcgtaaagaatgttggtgatcccttcacattggaggttattcgaggaggaccatctccaattctcaagatctgttccaaggttaacataaaatcagttacagtctttgttcttggcttttgctattgtgaaatcgttgttttaaaacgaattgtgttcaggtgaaacaagcagcatcatctgatggccataagactgcggataggaaaccccgaatgacggatcaagcaccactggctgaagaacaaactgataatcgggtcgaaaagagagctcaagttactgaggaaggagggccatctcgcagcactagggctgatccgggaaacttgcagcaaaagcaaccttgctcaatatctgatcacgttaaaaaggtgaaacagagtattgtggatactttaaccgatgtaaggcggtttcagtcggagctcaaggtaaaagaacagaatctagaagcttcattgcaagaaattgatgcgttaggtatgatctgaataccagtgaacactacttttaattgtgtgtgtggtttattttggttccagattttttgataatgtgatgttggaaacaaaaacaggggaaaagataatgggaatcagcaaaatcttcaacattagtcaagtttaattcagaaataaagattagaaaatggaccaggtactttatgtttgcaaccatggagttaagtatgtcactggataatatttcggaacttttccgtttccacttgtcttggatattaattatcccatagcctttatctcattcacgtctccgtcaagataaagttactgacattgtctttagattcgtatcccagtgattgaactgttgtactgaacgggacatgtctgtcttggtaatgatggtaagatagacttttaatttaaactggatattttcttttttttacgaaccaatctaaacgattcgttcttatagtatgaatcaaacgggtttaaataatgggttccataacattatcattaggtatttggctatgatatttaaataatgctgacaaaaataaaaatatcttggttgaagaattaaatttacaaaattattaacaaaacgtataagactaaacaaaaaaaaagaaaaaaaaaagacaaatttggctataaaaccaaaaatccataaagacctcaagaaataacttaaagagttcaacaatggcgaatcatccactatcttcttctcgatccaaccgaccttttttcgtcagatcacttgctggacacacctcaaatctagtaacctctctctgtctctctctctctctctcaacttaccaagaaactcaaatttagttgtcactgttgttgcagataattcctgatgagtttttcactgctcacttagagggtaaaactggcttaacgaaattgaaactgacttctgatgcttcggatagaatctgggatgtgagactgaacggccggagattcgccggcggctgggatgatttctccgccgcacactgtcttcgagacgacgacgttttggttttcagactcgacgtgaagatggttttccacgtcacaccttccggacgcagtttctcacagatacgtacatcttctagctccggcgactacgacagtgatgatgatgatgatgaagcaggggacgatgattcagattcgaagaacatttcgttgaagaagaaatcaagatttgaagcagagtcttcttcatcggaaaaatattgtcttctcggcctcactgcttccaacctacgcctaaatcgagtggttagtactacttggcatcaaattctttagagttcttgtttatgagttatttatatatatgtgaacattgaaattgtgttttgttcttttttggcagagttttacaaaacatttttcgagagcaaatggtttgacgaagagatgttgtatgattgatctaatgaatctaagtggggaatcatggactctgggtctgcgacacaacaaaagaactggtcaggcttttatccgtggacgctggagaagtttctgccatgcaaatgagctgaaacccggatcgttctaccggtttaagcttgtccggaatgggacaaggcctttgctacaattgtgttttaaagttattccacaaggaaactgttccaattccaaagcaaatggaaaagctaatgtttctgaaaagtatagcagggaagatgggagtgcttcaacgaagcagaacaagtttctgacagtaaccttgaagcattacatgatccagtcagggcaacttgtaagttttcaacgtcttaggtttagggttaatttgattatgcattttcttgtaatacttcacgaatgcttatgcagcgtctccggagatcatttgtgagggagaacgggatcaaggaggctgaagagataattctagtggacaaaaatggagtagagtggccatcctatgtatcttcttccaaacaacgaagagagttttacatggcacatggttggattaggttttgtgaagccaataagttaaagacgggagagaccttcacgttggagtttgttcgaggagaaggcacaactcctatgctcaagttctgctccgaggccaaggtcaaggtgaataaacaccttgtgattcaagtcgccttttttgttataatgaactatatttagactgttaaaatgaattgtattcagatagagcaagaagaggctccagaagagagggggactccgttaccaaagagagctcgagtgtctgcagaagtaggacactctcgtcgcactcaggcaccaaacaaatccagtgacgatccaaaaatcttgcagcgcaagcaaccacttcaaccctgctcattctctgatcaagcgaaaaaggtgaaacagagtattgtaaacattctaactggtataaaacggtttcggtcagagcttgagttaaaggagcggaatttagaagctgcgctgctggaaatcgacgccttaggtatgatctaaacactgatgaacagttgttttcttttactattctgtttctttgtttctaaaattttaatgttgaaaataaacaggggataaagtatcggaaatcaacaaaatcctcaagtaatcatcaagtctagaagggaagtgaagattaggaaatggaacatgaacttttgcaaatcttgttagtatctgccatctggaactcgttcaacaatcaagacaagtagtttctttagtaaatgatatatgatttacgtgtttgtgaaaatcgaaactctgtagtaaagctgatttctaaatagcctttggacgtgagattgtttaaagggatcagtttgattgtctaacgataagatgtgtgcttgtgggatgattggtaggtagtagaaaagtgaattgagaatccaaaaaaaataataattaaggtcagttttatagacctatcaaatttcaaacgtgacagtggtggcccccaccttactgacctatcaaatttcaacgtaaagtctccttgccagatttactgcttctgtctctttcagcgttttcgagaaagaacttgcatgctctttaattaaaacatttctttaattcgaagaagacttggaaaagacaaaattttcaagatcagactcacatatatctgagattattagtagagttgtggagattactttattcaataatggatgatccagcaatttcctctccaaccaacaagcatttcttcgtcatagttcttcatggacacaaatccagtcccgtaattactctcttctattcgtttctttatgtttctctctgttacaattgttcaaaaaaacttataactggtttatatatcatccttgttaatgttggtgtcgtgcagatgattcctgctgagtttttttcgacttacgtggaaggtaaaaaccaccagtctacaaaactgaaactgacctcggacgctttcgatagaacctgggaagtgaaattgaacggccgcagattcgccggcggctgggaaaatttctccaccgtacactctctccaagatgacgacgttgtgattttcagggaaatcggggacatgacctttcacgtcacagcctccggtcgcagtttctgtaagttacagtacatatcctctgacgaagatagggctgatgaagatgatgcatggaacgtgtattcagattccaagaacattgtgtcgaagaagaagccaagaacagaagcagagtcttcatccaaaaactattatcttgttgcgcatgtcacgccttcgaacctaagccgagatagattggtaaattacttgactgttctcttcttataatttgagagcatagtctcgtaccttcacactaattagtattaagcgttacgcttttgcagtatcttataaaggcttttgcgaggtcaaatggcctgaacgagagatgctgtgagattgatctaatgaataaacatggaaaatcatggacacttggtctgagatacagtacagtcaatgatcaggctagtatcagtggaggctggagagacttctgcttagtaaatgggctagaagctggatcattctacaggtttaagcttgtccaaaacggggaaaggcctttactacggttgtgttacgacactattccagaagaagactgttacaaaggaaacagaaaagttaatctttcagagagtgcttcaatgaagcagggcaagtttctgacaatgacctttaagccttacatgctcaagtcaggtcaacttgtaagtttttaatatcttaggtttagggtttaattatgcattttcgtgcaatactttatggatgatttgaatcttatgcagcgtctctcgagaccctttgcaatagagaatgaaataaaggaggcagaggatataacactagtggacaaaaatggaggaaactggccatcctatgtagcttctggcgatggtcaaggaggaaagtattatttggcaaaaggttggagaagtttttgtgcagccaataggttaaagacgggagagaccttcacgttggagtttgttcgaggagaaggcacaactccaatgctaaagttctgctccaagtccaaggacaaggtgaaaaatcaacttgcgtatcaagtcaacttttgtgttaaaatgagctgtattgaatatttttttaatgaattgtatttcagatagaacaagtaccatttgatgaaggaggggagactcaagaagaaacagagactagggtcaaaaagagagctcgagtttctgcagaaagaggatcttctcgccgcaatcaggcatcaaataaacccaatgctgatccacaaaacttgcagcctgggcaaccacattgctcaatctctgatcaagtgcaaaaggtgaaacagattattgttgacactttaaccgggataaaacggattcggtcagagctagaaagaaagggacaaaagttagaagcttcgatactggaaattgatgctttaggtatgatctgaataaccgatgaacacttgtttattttctttactaattaggttctttgtgttggaaaaaacaggggagaaagtgtcggaaatcaacaaaatcctcaagtaaacatcaagtttaaaagtgactgaagatcaggaaatggagcatggactcttttgcaaactttgtttgtatctcgacgttagctcattctagactttagaactttcctgagaatgagattgatctcataatccctctaattgatgaaagtctgtttcttttcccacatgttcaacaatggagtgaaggagttagttgaccatagagaactccttttgtatagcattatctcatcaagtcttatgacagttgattttctaatcctcaagaataaaatatgtcaaaaccaaataacattacaatatcactaatacaacaaaagttgaaactcacaatgcattacaatattactagtttctcagcgatatagtgaagtagtccaaattgctgatacaactgaagaaggcccttccaaactacaaacttttaagtacagtctctaaaacttgcaagtctcaaatacagaataaacctagtttagtgaaaatcactctttgtttctttccccatcttcagtctcacttcaaaccagattactgctgaggattttgctgattccccatatcctctcccctgtttcatcatcacaacattagaaacccaagttcaaaaatatcggttatcaagaaaaaacaactacatcttgattctagaacaaacctaaggcgtcaattgctagcaaagaggcttgcagattttgttcacttgtctcaagctcagtccgacattgtctcacagtgttcagactatctacaatgccctgtttcacattagccacctgatcggagactgagcacgatggtggtagcaagcgctgtaaatttcctgagatggtgttggttctgtttgaaacctgagtgtgtcctctctcctcatcaacttgatacactggtccctctactcctaatcttggagtctttttcacattccttggctgtggagcagtctcacaagctctcttcttacgagttctttggtttccttttcccttgtattcatggttttcaatctgaaagaaacatttttgcatctaagtctaactaagaaaggcaaaatgttttgcatatacataaagttgtgttgtttggtttcaccttggagcagaacttaaacataggattagctccttcccacaccagttccagcttgaaagaatcatttactcccactccattcgcttcgcacatctctctccaacctcttctcaaataaaaccattcacttccggcgcctcttccaagtcctgttatctgtagataagatgaccactttcttccatcttggttcagcagaattacctccccagtcttattaatgctattgttcctcgtgaaactcactggaagtgactgaacaagattcaatgatcagtatcaaaagcttaaactcgtaacgatgttcacaaaaaacgtttatgacaacaagttgttgaacttactagttgcccggtagtctcacggctaggtgtatactttactatcagaaatggtgaaggggtcttcttctcctttcctttggaaacttcatcaaacgtcctcttctctttacggccattgccagattcctgtggacacaaccaaagcacaggcctttcctcattttggaaaagtttaaacttacataagtctccttgagttagcccattagcgcagcagaagtttccccagcctagtctgatgtaaaacacaccacttgagatgtttttggcaagtttcattgtccatcttctcccttgctcatccactacatcgatctcacatgttttttggtgcccaccaaacaacaacgtaaaatttctagaaagatcctgcaaaaacattatcaagaagtcacatcactcaacaaatattataatcttgaatgttacatcaaagctaaaatggagtttaagtagtcaccaaacggtcatgaaggaggctataacgagtgacacgtgctgtgatgaaacctgagtggtctgatgaagaatctgcttcttgtcttttatccgtcttctccgatatgttctctgaatcacaacaatcttcactaacataccggttacactaaaaaaaaaaaaacagattgtgtaatacttcatgaaacaccttacctatattatcctcgccctcatcatcatcatcatcatcatcttcgtcgtcttgtccataatcatcatcatcaacatcgtcaacatcaatataagtatcttccgtaataacttggctagaagatgcgttacgtatgtcgccggaaacagatggggacaccacagctacatgaaagacctcgtctccatgatgtttgaaaaccaaaacgtcaccgtctctgaatttctggtcgcaggcgaactcttcccagccttcggagagcctaccgccgtccagtttcactttccaaactttgtctgaagcatccgattttagtaacactttcgtgtgattcattaagaagtcagcatcaagagtctgcaaaataaaacaaaaaggaaccagttcttgacgatgacaaagacagtaacttaaacaaaaagataaaaggagagaaacagttacgagaaatggtttgtctccggtacgaaatttttgctgaaacagagagaaatgtggtggatccgccattgttgaatacacttcaaaaatctcagtaggagatttcaggtcagagagtgagagaaaaagcaataaattataattatctttcctagtaaatatgattgacgttttcttttcttagaattacgttacgagaaggtaaaaccgaatctattaaaaatcgaaaaaggtgatgtgaatctttcacattggttaaatggaatatgtgtacccatcatctttttcttacaccataataattgtccatgtaaaccatgaaaccaacccatcacctacgttaacacaggactagactctatgataggttttttgttgatgggaactctatgatagattaggttctgataaaagtgacccttttgtaaaaaaaaattgttgtgcgaaagttttttgacgtgccatgaaacgattttcttcatcataatttcgctatacaaaaattagttttaattggaaaaagaagcctttgggccttttgggccttactatatgagatgagcaacggacagcaagcccttcttgttccgacagaaggttaaagactttttgagtgttgactattactctctcgtccaatttagtaatccactggaaaaagctgtaacctcgcttaagaactaagatcctcaatccaagggaaaaaaactgtaaattgaaatgaaaatctgataaagaagtaatttttaatcgctctttcttctcgaaatgcgtctaaatcacgttgaatctgccaagaaacgtgtaccctgagaggaattttccaaagatttataactcaaatcactcttctttccccatggaggttcaagctgaaatggagcctacctcgtccattaggtactgtagtctccttctttagtgctctgtttcttcaaattcaattcgattagggatgtttctgatcgatttagttagtaggggtgataattattggttcagaggattcgataacttcttaaagttgtgatttttgaaactttgaattgcggttcttcatctgggtagatctggatctctagagagttatagagaatcaaagctatagacattttaagtaaccttatttactggtttgttctatgatgcagtttagtcgcagctgtttcatatggcattgcttcaatggcaatggtttttatcaacaaggctgtgattatgcagtatccacattccatgactgttcttactcttcaggtactgatatccatatttctcaagtactagatatctaaagagattattcacttcctgtaaatgctgattatgaattcggtcccgtttgcttttgtttggttgtgttagcaattggctacttctttgcttatacactttggtagacgaatgggatacacaagagctaaaggaattgatatggctacggccaaaaagcttcttccggtttctatcttctacaatgctaatgttgcatttgctcttgcaagtttgaaaggagtaaacattccaatgtatatcgccattaagagactcactccacttgctgttttgatttctggggttttgtttggtaaaggcaaaccaacaactcaggtacttaccataagaatgttgattttttattgtgaatttgtataatgtttcaagctctgaatcttttgtttaattttcaggttgctctatctgtactacttaccgctgcaggctgtgtaattgcagctcttggtgatttttcttttgatctttttgggtatggtttggctttaacatctgtctttttccaggttggtttcatttgttcttttccttctcttaaatcagtctccactcacccatacgagtaaatgaatattgtttctcatcattgctgcagactatgtaccttgtgctggtggagaagtctggtgcagaagacgggctttcctccatcgagataatgttctataacagcttcctttctctcccatttttgtccatcctcatcatagttaccggcgaattcccaaactctctatcactattacttgcaaaggttagaaacttcatcattccaagcttgcggctattctcagaaactagtctcttcaaaatgtcaaaatcaatttttttttctttgacagtgttcttatttgccgttcttggtgattctcattctttcactggttatgggcattgtcctcaacttcaccatgtttctttgcaccattgtgaactctgcactaacaacaaccatcgttggtgttctcaaaggcgttggttccactgtaagtataaaccctcatttggctctctttcgagatgaaatctatagaggcaatcatttactaatctttgcctcctttttaatctcctagacgctcggttttgtcctcttgggtggtgttgaagtacatgctttgaacgtgtccggtttagtggtcaacacagctggtggtgtgtggtactcatatgccaagtaccgacagaaaaaggctaaaccggctaagctaatgtctgatttggaagctcacaaaaaatgagaatttcggtccggtttggtttcgtttgggaaggcattaccccggtttatagactttgccactcaaatcaatgatcagaacgaaccgatgtatttgagagttgaaccaggaaaatcggtcctagagtgagatttaattttgatgtgaaacttcattgatcagttaatttctcgtttaggttaagaaaaaaaaaaaatcaatacctatttttatatgtagatgcaatcatgctaatgtataattgttaagttgtggctgtagcataaccatattaaacattagacatgtgttggtatcaactatcaactatcaagaacacatgaaatgtttgttctatttaatggtggaaaagttttttaaatgggtctactactactactaattaatactttggattaagacattttgtgatagaaaaagacagcacataagtcattacaacgtcagtgacctctgtttaagtcttaattcgtttccttaaatctacggtttgtgcatacggatcataactaatatttttggtttttgaatttgcaaacgtttttagttggactttagagatttcaaataaatgaagataaataaatgactcataattcatacgaaaggctatagcatttatagagttcattttcttggcgtgaaattagtagtacattcatttattccatgattttgctcagaatattcaaatttataaaagaaatggacattactttggaagagttgaaaaacttataaaacaaaaaacataacaatagaaaactttaatcgattaaatgaattattgaatgattgtatccactaattacaattattgaaataaatatgtataaagtagagggtgtaaagcactgtatgaaaagattatgataacatagttcaaagaatatcattatgagtcataactaataatcattcaccaatacacaatcgatcatcttaatatatacatgattaatttggattcattttaaagcacacttaaaaatatatcatgtccaataatttgtgaattattatttcatcagaattgtcatagttatctaaccatttgtgtttagggcagaactgtgtctgaggctaaattcattaaaaaatgtcactaaattctgcagtttttgtttttttccatctatgacgttatataatagctagccagtaattattaaaaccgtatagaatatattcttgagtctaactttaatctacatgacaaatttttaattactcagcaccgattggtttctgtagatgcatgtcacaagcaacacaaaataaaaaaaggtattacaaaaaaatagtactaacctacaaaattacttatttataattcttttgatctttctccttttagcttttccttttctcttattagtgtttatatgatactttcgtaaaacgttaggtattgtatagtaaataaaaccttaaaaatgccaacgaatatccttatcttctagtgttctacatgtgttgatatcaccaccgacaagtatctcgggtaacctaattgttggttggaactttcagaatttttaaaactgaaaaattgacattatccttctaatgaatcacattcttcttttttttgtcaaatacttccctttgtcaaaggcatgcaccactaaattatcttttgttttacaaaatgaccaaaattagcggcaatattttacgtcaacacttgaccaattttgattgttagagagcactttgtcaataaaccaaagtataatgtttccctccttactctcctaatgtataatatatattttgattatagaactcatagttaatattgagttgcatccctttgttttaacagtaaggctttgacttacgtttgtgattataccaattaccaagtatgatcaacactcaagatttttttttgacaagaatataataatgaaaatgcttatgctttgagtaaattaatcaggaaaacttttaactcatgttaatatagtatttttaacaaatatgaatggactacaaagagaatttgactaaatgtataaaatatataatttggaaaaaacatggaacatgacatggggagcacgtaggagaagcggtgatagcaaaatagagtgattcacttgaaaccgatttggtagtatcttttcttataaacatgttccaatgtaactagtacatagttggtcacaaatacaaatttgaatttgtcttcacctcaaattgccaaacaacccatatggtccccatccatcaatggattttcctcaattttctttcttttgaatatataacaaatttgttttttttaagaaaatacaaatatttgtaatgaagatccatgacatgacaagtgcttgtgaaagattacaaagagtgataataaaaaggggatgaattttgcatgctgaagcaatcaaataagtagctgaaagagtaacacacacatgaaagtgcaagtgacacatcttttacaacttctctcactgatgatacctttcttcctcttcctctgcctttgcttctctctctgagtcactacactctctcaccaacccatccttctctctgtcattctctaaaaaaagaggtccactataaatgagccttgagctgtggatgcttctttgtctggttttttagaatataataaaaaacaaaatgggtctctagatttcagatttctgggatctgggtgttagattaatctctttctcttccattattagtagagaaagctcactcctttcactcaaagtttctacctttttgttttcctgaaaatgggttgtgtttgaaatctcacactttgagatttgggtgtttattttgggatccttcttaccacatttagaaatttcagctagggttttcgatttctctacttctcagaggagattttagaggcaaaagatggctccaaggttggatttttcagattggtgggcgaaagacacgaggaaaggaacaccagttgtggtgaaaatggagaatcctaattactctgtagttgaaatcgacggtccagattcggcttttagaccagtggagaagagcagaggcaagaacgctaagcaagtcacttgggttttgcttctcaaagctcatagagctgttggatgtctcacttggctcgccactgtcttttggtctctccttggtgccatcaagaaacggcttagtttcactcacccacttggctctgagaaattaggcagagacagatggcttttcactgccattaagctcttcttagctgtttccttagtgattctcggctttgagattgttgcttattttagaggatggcattactttcaaagccctagtcttcacatccccactagcacacttgagatccagagcctgtttcatcttgtgtatgttggttggttaacccttagagctgattatattgctcctcccatcaaagctctctccaagttttgtattgtgctgttccttatacagtcagtagatcgtttggtactttgcttgggttgtttttggatcaagtataagaaaattaagccgagatttgatgaggaacctttccgtaatgatgatgctgagggatctggatctgagtatccaatggttcttgttcagattccaatgtgcaatgagagagaggtatgctcattcaactttggtatatccaagaaagtattcatctttctcctgctttatataacctttttggtatcagtgtaatgagctttagtcttcttcttgttcaggtgtatgaacaatctatatctgccgtgtgtcaacttgactggccgaaagatcgaatactggttcaggttctcgatgattcgaatgatgaaagcatccaacagttaattaaagctgaggttgccaaatggagccaaaagggagtcaacataatctacaggcatcgcttggttagaactggatataaagctggtaacctcaaatcagcaatgagctgtgattacgttgaagcatacgagtatgtcgcaatctttgatgccgatttccagcctactccggatttccttaaactaacagttccacatttcaaggttggtattaacattggtttcaattttctatcattgaaaagtggagagagagattgctaacatgttaaaaatgtgatttaatcttcaggataacccagagttaggtctagttcaagctagatggacatttgtgaacaaagacgagaacttgttgacccgtcttcagaacatcaatctgtgttttcactttgaggtggagcagcaagtgaacggcgtgttcttgaacttctttggtttcaatggaacagctggagtatggagaatcaaagcccttgaggaatctggtggttggcttgaaaggactactgtggaggatatggacatagcagtccgcgctcatcttcatggatggaagttcatatatcttaatgacgtcaaggtactactttttatcgattgtttctaaaaaaagccttatttatgtaacaaaatgaattaaactggatagaaacaaatctataggtcctttgcgaagttcctgagtcctacgaggcatataagaagcagcaacaccgttggcattcgggacctatgcagcttttccgcttgtgtcttggttcaatcttgacctctaaggtagtgtgcagcttttttcttcttttagttcaaatgtttgctaatcatcatgttaatgacttcttctggttctcattggttactcttgcagatagcgatatggaagaaggcgaatctgatacttctcttctttcttcttaggaaactcatacttcctttctactccttcactttgttctgcataatccttccactcaccatgtttgttccagaagctgagctccctgtttgggtcatctgctacataccagttttcatgtctttcctcaaccttcttccatctccaaaatcgtttcctttcatcgttccttatctcttattcgagaacacaatgtctgtcaccaagttcaatgcgatggtgtccggattattccaattgggtagctcttacgagtggattgtcacaaagaaagctggaagatcatcagagtcagatcttttatctatcaccgagaaagagacaccaaccaagaaaagtcaattgcttaggggagtttccgacagcgaacttttggagctgagccaacttgaagaacagaaacaagcggtttcaaagaaacctgtcaagaaaaccaacaagatataccacaaagagctcgcattggcctttcttttgctcactgcagcgcttaggagtctcttggcagcacaaggagtgcatttctacttcctgttattccaaggtgttacctttcttcttgtgggtctcgatctcataggcgagcagatgagctgagaagaacaaaagaagattcataactcgggtcaataaatcagtgagtttgaatttccacttcctctatgttcagtggtatcctctgtaatgagattgttggaaccatagtggtaggcattaattgattttccgtttcgtttgtttgtttgttatgttggtttgattcctccattgttagggatagagtgtgagccagagattcatacatgtatacaatatctgtaaagttggaacatgttgttggcagttaaaagagcttctgtcttgaactaatttcaaggatcatgtcaaatcactgcagagaatttatgtaatttaaagtccaacctttgtggaaagagattgtaactgtaaataactaacaagaaccagttttctgactaaactgaaacaagagaaagaccaatatttattgtattctctgaggatcttaggacattctcaacttagtgtcggtgaaaagtgaagaaacgtggagcaaaaaaagtgtcggcagaggaagtggaatgaggagaagcataattgcagaaaaaaagcagaggtcagagaggtttacgtcacataacaatcaattcaatgatgtgtaagtgaagaatgggaccaaacagattttaatttggtgggtttgttgatgattctgggaccgaactaggatcatgatcttgtctctcttgcttttctaggcttttaattgttgtcatgccaaaacaacgtctccatgtctacttcgcaagtatacttttattttttcacttaatttgggatttatagttgctgaaacgaaaccatagctagttgttacgtgaataagagcaaatcagattatgtattcaatcttcctcttaggcaattactttgcttcaccttcataaaagtgaacaatttcacaactatgcttaagtgaaatgaacacaagtaccaaatggtagcaactgatacgcatttacaaattcttgacttgcctatataaaccgtgaaatgcacaaaaatctatccaaggacaagaatgtgcatactaaacactatcacatagctacaattatgctaaacctaatgcacaacattcagaccacacaagaggtgcttctgagtgatgcagctcaagttcatgcaaagaaggtaacctcaaagctgatgaagttttcaaacaatagcgcatctctagggtcgaagatgaagtagaagcaagccatgtagggatccacaaccgtagttaacttttcccatagcaggccgagtaactaaacgaagatgattcatagcagaagagtagagaagcaagtagataaacaatgaagcaggccgagcaactaaatgaagatgatgttagggatccacaaccgtggtttaacttttcccataccaggccgagcaactaaatgcagatgattcatagcagaagagtagagaagcaagcagataaacaatgaagtaggccaagaaactaaggaagatgcttcatatgagaagagtagagaagcaagtagataagcaatgaagcagtagtagtagtagtagacccgaagaaacctcgacacggtggaaaaagacaagaaacgcttaggcatttagcagaatttccaatcaaacattatgtctttaagaaactagggtacgaatcaagtgttcttttacctattggtagatacacaactacgtacgtttcatatccaaaagcaaaagtagcaagctttatccaacccagcagacctaaaacatgttctcttactgaaattcatagatgatagtaacttcccttagtccctctcttcttctcttccaaagtatcctcccacacactcgttttcttgcaaaatcactcactcagctcctgcttctgcgtctttctttcagtccatttctgaagaaacaagaacagatgttgaattagcatctgaagaaaatgtaaatgtttatctctaagaactataaccaaaacctaaacactgataatgatatagagacttgggaaaaagaaatttacccattagcatatggcacttcctcacgcgctctgtatggaggtggtgatctactgtagctgcggccacgggcaggaggaggagaaggactgcggcgccttggaggagggggagatcttgcacgagggctgtaactcctaaaaccagaaaaaggcaaggttacttaatccgttcaaaataaggtactaaggtaacaaaataaaaagcatcactgacctccgtccatagcttgggctccttctgtatcttggaggagtgcgactacggctcttgctgcgacgccttccagttccaccacggttacggcattcacgtgcgaaatgaccagtctcaccgcattcatagcatttcaaatcagagccaccacgaccaccacggccgccgccaccacctccacggtcaccaccacgaccgccgccaccacgctcacctcgattgtgagactgttcaaccctccagccattcttgcctatccgttatcacaatatccatgtcaaattgtgaagtttcaagtcaaaagtaattgcaaacctcaaatttctctcctttaaaagattccaccaaacttattttccaatcccaatcaaaacatcaacttctaagagaacaaagcaaaatagaaagaatatgaatgcatcattaccatctaaagcacggatagcatcacgggcatccctaggatcttcgaaatctagaaaagcgtaaccaggtggtctacgggcaacccaaacactgcacattacatatgaacattagagagatgcaaaattggatacttttaacttcaaaagtgacaaaattgtagcgcgaactgattgattggattgattcttacctcctgacaactccaaaggcacggaactcatcctcaagttcacgctcagtaactcgcgggtccaaatttccgacgtacacacgtgacattacttctgtaacctgtcaatggcacaataaaccaaggtcaacataaaggaattctaaatcttttctagtaagacattcgaaaggatttgaattcatcgagaaaaaatacagagtcactagatccaccaagtgacccgatcaaatttgaacagatcggatcaacgttaccacaattaagagtgagaaggagataaagaaacttggttgcgacctaccttgtgggaagagctgaaagcactcaaggggcaaaaagaatggctttttctgtgttttgctttgtgaagaaattagggtttctgaatctgaaatttgatgaaatactttccaaagggttttgtaagcgcgttaacaaaatttagtaaatatacaatttgggcctatttattgggcttaaaagtagccttttcatgccttttttcaataatatgttagtgtcggtgatatttattttttctctgtatagtttgttaaatacttaaatgtgatcatttcacgtattttgctttgtatttctgaaaataatgaatagcagaatagggaaaaagaaaaataatagaacttcaagtctctctagttaaatcacactttcattccacagctactaaataaactttctttcttattcgtttgaaaacccaagcagtttgtgattcggatcaataaaaatgctgaaaccacagtttgcttggttaatataagctaaacaatgaattaaaaacaaagacaaagacaaaaaaaaaaaaaaaaaaaaaaaaaaaaaattagtgttggagacgacaacacatcaccactttgatgagcccatgcatgctataacgagaaaccagctgcaaatatacgattaaaacacgtcttaaaagcttagcaaatcaagctactctttgcaacttgttttgggattaaaaaaaaaaaagtcagtaatgagcttacgaaattggaagtttggttagaccacgaaagcagccaaaagagcatgcaatatcgcccagtatagcatgatccctaaccgtaaagcaggttgtctcatgagcgtccgatcacaagagaccctgaaaagttcagaaaccaaataaaagggtcgttttttgttagatcataattaaagaactttacactgaacgagatccatggatgaaaagagtctgaccataaaccatcgaccatgttagtgatgggtcttgtgaatctaggaatgattcttgacgtagagagtgatctgaaaccatgagctaaaaaacagaaaaaatacaaatgggaatgttactaagaaatgttgttaaaagtactaaatattcagagacaagtttaattacctttatcatcatcttcttctaagctaccgctttgatcagtttgatctgcatctatactaatggcgacttgatccatatttcccttacgcaaactccggacttgtgatggaatcgatgtttttgtccacttgtttatctgtgatatccaacaaaaaaaaatccacaattaaaaatttatcatcttgaggcatctggaatggtgtaactatttaacaagctcaaagcttaccagaggttccacttcaacgatctctgacgtcgagcttgttgaaatgtcttgttgggattctttctcaagtaagaatttctcaagagttgcttctttctgtctgagctcagccactctactcctctcgccttcaagcaaaacgtccttgctttgtccaaccaaccgtaattcgtctatttcagatagcatagacgctatccttttctcaaatgtctccatgtagtggtttatatgactgtcagcatcagtggacagcgaatcttctataccaagtagtgaagctatcgtgtcgaaccaagacagtacagtttggatctcttctgaatctctcttagtgcccatctgagaagcagcaagagcctcattggtgcacctagtgacttcttgtcttaagaaagaaacctctgtatcccgatcttgcacttgctgttgaagtttctcgatttcagcaagaagattttcagagaggtgatggagctcatcgaatttatccacagtaattgatagctttttggaaatcttcccacgagaagcttcagctttctgcaagtctaggttcttctgttgcacttcctgttctaattctgtaactctgagtttcagatcctccatctgagactcttcctcgtcaagcgcttgcattaaggcctcaatttctgcaggaagcaattaggtatcagctatatatgtggcggtgcaaaaacaaaagggtaaaagagaaaaactgacctaggtctttcgcagctagtagatcactaagagatgtgaccttctcctgtaattctgagtgtgacgcctgccctgctagcagctcttttactctctccttcatagaatcccgttcccgaaccaaaatacccagctggtcttgcatatcacgcatccgggcacttgcagattgaagatcttccgcaaagatttttgcaccagcctgggcttccttaacttgacccacaagttcattgcacgtcctattattttggatgtccttttcgtgtaactccctttgcaaattggcgatgattaccttcatctccttttcatttctctccagagtctcagcgttcgctacaacaagctccttaacagctgacgatagcctatttaccatggacctgacagattccatagacgaaaagtcctcatctacttggtggagactcatattaaaatcgtcatttccaacaagttcagctttacgcctttcaatttccaccaacacgctagaacatgctccatgaagcaaggcaattctttcaccaagagcggcaacttcagagtccgttcctgttccaattgacttgaaaaaggtgtcgatactgttggatacaatattgatctggtcgtgccatgtggccaagtgcttgcttactttctcttcgagatggctaacaccaaccacaaattgatcaaggttttgggagagagaaccacaaatttcggctatgtttccaccacttgatgtctcatgcaagttaatgttagaccaagcagcactcaagcgtgcaaagatttcctacgcagaaataggaaaaacaatattcagaaaatagtcagaggcagaaaaaccttgaaagtatatataccataataagctgttaaaattatttaaataccttgtctaccagattctctgtactgagttgaggcaagccagacaaatcagttccagttttcttcgcacataattccatatttgccttcagatgatgcagaaactccatatccatgatgaaaatatcagctaggcaactgttggtacctgcgagtattttccttagagagttcacactggttccacatgatagcagttgagcatatagcttattcttttcttcgttgctgactgctgataaattttcaaaacgagatatggcttcaacctttgcagcctccgctgcatccttctctctggaaagttgctggatttcatatgtaaattttgatagatcctcttgcagactatcgtttgtctcctgaacttcgttcaactcagcaagtagcaactcagctgctcttctagattttctcgactcctgctcagcagaagtcacggttgtactcattgtttgaaacagttgggagattcgttgaagcttcatgactggatcatttatgtcaccttcatcaccaatatcaatgctatttaacgcattcaacgtcatgctcaaattaccacttctttcctgtaaaagatattctgtttcttgcgaatgaattttcaacaattggcactcagactctagggattctaccctcacagaataagattccaactccctaaatttcttttcattttccaagagcttttcatctcttttgataatctctgatttcaggcgaccaagctcagcgttcacctcttcaatagtttgcttcaggctatccctttgctggaccaaagccttccctttcctaacagctacatttaacttctcccttacagaagctgacttctgctcttcttgtttaagaaactcctgcagttctattattttcttatcaagtgcctcattttccgcaaccaaggattgttgttttgccatgtacaaatctctttcttcccttgtcagcttttgaacatgcagtgcctgatccagatcttttgttagggaagctacatcaggtgtctctacgactgctatgtctctacttgttgcttcaactacattagaatcagacaattcaaaatgttgcccatgagaagttgctccatgtgcacccaatgactctccgcttctaacatcagcatctgatggacgagtttcacagacgttgtcatcggtttcacctggcaaactagatttcaccaaattcttataatagtctatcagctttctcagcactccatccaagttctcagaattacttgctaaagccaaatcttgcaagccatcttcctgtataacatcatcaatcatgtacctcaaacttaacaagtctccttcaatagtctgaaaatgttcttcattcccaagtttctcaaccaatttttcatgcaaatctttcacttgattctgcagtttctcattctcaacttcaaggtgaatgccccttgcagaaagactctcatgatcaccaatcaaactttccagcctttcagaaagattcaccctctcactaacacatgattgaagatttccctcgacatcacctacttgcttttgtgagacttccaaatcagtagttactgattgacaatagacttcaaggttatcaatcttctgttggagattatcccggtcatgtgtagcctctgtaattgtacttgcaagccattcaatcttgttttccacttccatggagtgtagctgtggagggatatcaatattttccaggagtttttcccatctctgaaccaaagtattcctttccatcaaggactgctccagcatttcattctgttcagccaatccataaaactttcctttgagctcctcaaacttgatcctcaagtcatcctcagaacttgtgccagtttgtacatcctccctccagggctctgagagaacaaatcccgcacctccatcagaactcttctgatcccaaccagaggggcgcgaagagttgccgttagctgatcttgctaaccactccaccttttccaatatatctcgggcatgaaaatgctctgggagatccaaatcttccaaaatttcttcaattctatgaagcagagagtctttcagaagaaacgattctcgcaatgcagtagctgagtttcggatgtatgacagctcagattctaatgcttccacacgttcacctgcctcaatataggtcttcagttttttttcaacttctacaagcctagcgtccttcgaattcaattcttctgagcacttctgcagtttagcagaggcttcggccaacgactgcttgacattgtcacgctgaacaatcaaaccttttcctttagtaacagctatgctaagcttctctcgagtcgataataacctctgctctgattgttcaagttcattagatttatcttgtaactcagatcgtacagccacaagggactcctcagcctgggttaaactttccctgagaccagctattttagtcttatggtgcagtaaactctcctcgatctccatcaactcattccccttggcctctaactgttttctgaggagattagctaattcctcaatctctataaacttctgaacaagttgggaaacgagaaactccacctgtgaactaggagattcaaaaatcactccactttcaagttccagaagaccctcaaccttctcaactaactctcgaagtgaagtggaatcaaggcttcgctgcgtcatttcctccatatcgtttgatttactcgacaagtctgactgtagcttatcaatcacagactgaagttcaagcctctcagaaagaatttttcgcacagcctccaacagattctcaaaactaccatctctgaaaggatcaaagacagctacattttcaacttcaagactggtcatctccgctgacccacatgattcagtaatcaatttcgtcagatcagcatagaccttctgcattgaagaagctgtaaattcattcttctcaaacagagtattgaaactctgcttcaattcctcatatttgtttgaggtggactcatgcttcacataagctgcttctagtttttccttgaggtcttcaatcacgtttacagccacatcaacagaaccagatatgcgtttggtcatatctaagccagtatgagctccagaagtgccagatctgagtaaacaatcatcaagcctcacaactgcttcaccaaattcagacatcaatgatgtcaattcatgttctaccatcattgcccgctcagattcatcctgcaaggccactaactgttcttccattgtggacaaaaagctagttaaattctgctgtaagttttccagctgaatttcaagctcatcaattctcaatgagcaataattcagcttcttattgagctccgtgttttctacactgatattatcatttcttagctttaatgaatcacagagaagttcaagatcatggtttttatgttgcagctcatacgaataatgcttcagagcttcgaacgaaaccttactctcaatagtatctgcctccagaacattaatgtggtcctgatgtgatgcaaactcaacatttaactcctcgagtctttgatttgtcgatgtcctgtcatcatttaactggttgaattgtatgccagccttcctagcattcaacagtaactgatcaagcaaacctctcaaatttctaatctgcacattaacagaaacaaattgatctgcttctgacagatcatcagttaactgtgcattctcagattcaggttcttctggtttccgttttgactcaaaagcttgaatcagttttgatactgctggcgtggcacctttatcgctagatttactcactgaagaatcggtcaggatctgcttaattgcctcttcaaggttctgaaccattttctcccccttctccagattcttcatcaaggcagaaaactcagaagtatattccctaacctcttccaaatttgtatattgcgtattttcaagaaaagatgcactctgtttactaaccccgatttccgaacttctaccaagtttctcagaaatttcctgattgatcaaccctgacacatctgcgctaccattgtctaccattcttgctttttctaccatgatgctgctagttaaagatgtattttcttcagccaatttatcaaggcgcgctattgcttctcttaactcaacttctagatgagtccgctcttcttctacagttgacatgtgctcttgaagagtaagaagttcctgtgtaagtttatcattttcctcaaccaaatgttccttttccccttgaaacttcaagagcttattatttaacaaagtatatccctcctttagattggaatactcggataataaataagtctccgagatcagatgtgcactcagttctagatgtgctttctcattttcttctctgagatgtatgttgttctcttcaaacatagtctgctggcgtgtcagtaaagaaagcgtctccttcatgtttgagttttccacctcttgcagggtgaccacggtcttacaatttgccaattcttcctgtaacttttcggcctcacccaataaactatatttttcctccacaagatgtatcttctcatctgttaatggaccaatagtgttttcaaattgctcaacttctgcctttagtatggccgccaggttcttgcaattgcataactcagatgaaagatgcttaatctcatagttcttggattctttttcttcaataagttcctttttctcatcattcatggaagatataactgcaaccaacgtatcattctctacctgaagattaatgaatttttcttttgtctcagatagatccaacagggacttttctaggctaagctgcaactcattcatcttagcagtgaaatcctccacttgtgcttctgtagcaagaagctgattttcaaggttcgtgtttgagcttgtagcagcatagagtttagactggcactctgatagttcctccgcaagagaatcatttctctctgtcaccgcactatatgatgcacgaagctgtgatatttcagctacaaattggttatgttgatgatcaaactctatttgtagatgagactgttctgtgagttgcacatggagtatatcttccatggtactcgaaacaaacagttcttctcttagtcgctccaacgaacttgttcctggctcagtactagaagcagcctctcttgcgttgcacaaaatttgatattcatcttggccaagtccttttacaatatccataagctgtaagaagctgactgagcggccttcatgaacatgagcagaggtaagttctgcagataaattcaatgtgtcaattttacgagtttcctcgtggctcaaaactccagatatactgacgctctcaggcaattgcagctgactggccatttctgcaacagagctttcctcaggttcagctgaaagcacgtgatctctgttattaggaaaatcaatagatgtttctggtttctcttcgttaagctctgcagcttctctaatctgttggcttctaaaattaccatttataccttctagttcaactgtatcaaaggcaactgaggatccctctgaaaagtgtgaaggagaagcagatgaatccacaacagctggatagcttgtttgcctttcttcagttgcaatcttatccacgcctgcctttgcagataattcagaaaactgctccatgtcttcttcctgcatttcccctacccagaaacaaatgagaacttaattatacatcaaaaggtcgcatgcaatagacataacctctttacccttatcagagaaaaggtaataaagaaaatgattgaagagagaagcatgaagagaaggagagaacaacctacatcagttacctgatctccccttgcacgaatcaaggaaacatcaggaatatattcttggagagaggatggctgatgcggcttttccacattcccagaaccaccttcaacttcaacaccttccccctccgctatgtttccagaagcagcaaagattccatcaacattagatgcatcgtcatgtgtaactcccttctcagaatctgcagggtcagatatcaaagaatccactgtgccagccactccactgttgatagacttcacattctcttcttcagtggataaagatttactgatatcattttcagaattaactacttcttttctcgcttcagatccatcattagaagtggtgtgtcctggctgaagcgcatcaggctctgatgaggaaccatggactgaaacatattcgtgagcttttgtatctgaagaagtttgtggagaatcgacaacctcctcagcaacattcacatgagatgtagctcctcctacagtcacaggggatggagcttgtgcctcgtcactgacagcactagtgtcaggtttacgctcatgcttctcagatttattagattttttggaggatttgccttggcttgtactgcctttggagtcctttttctgatcagtgcctttgtcagccttcttttgacgaaattgttgaagctgaaatgaggatacgaaactaagcgattaaaacattttcatccaatgtttctctatctatatatatataaatctaggcaggacaagtaatcaagtagagacaagttgggtaaaactctctctctctctctctctctctctcttctcactgacatttgtgataactaagcaactttacccaaattccaaagaggtaggtttaaggacaacgaagctaaccttctggcgcccagcagcaagcggatcagcacggttctttttcttgtccattcgattcactgtgttcttgttcccacaatgactcttcgtggatcaccaccaagtttagataaccatggttcgtgccacctgattgacgcagaatccaatcacaacaaagaaaactgagctaaatttcacaaaacttatatgataccgacacaaatatagtggcttagaattatgaacaagacaaataaaaagcttgtgtggctttaaattttgtaaaaaaacagacccaaattgtgcagcagctaaacgaaaatcaatctccagattcaattgaaaaacaaacccatcagaagctaaatccaaactcgtttccaataaccacaattggagatcatcaaattacacacaggaactcgatgaataacacgctagaaatcacgaaactgagctaaaccataccctcgatgcgttgaagagaaaactccacaaaggagactgaaatcgactttgctcgttaatctccttcccgtggagaatttgcttgaaaccacgtatacgtcgctctctccttagatctaacgcaaatggcctttagctggtgtgtctcgttcgtttgaaccaaaaaaaactgctagatgaaaacgcgacgcgatttaacctcacacagacgtcgatttgaagcgaagagaagaattc

SEQ ID NO: 654 - DNA, 111517 bp, Arabidopsis thaliana
ataaatcgtctgagtcggattatacttcgttttttcataactctttttcagatacaagaatcggttgtttaagaaaaaaagaaaaatcgctgtttaatgaatcattttaccaaagaacccatgtagactatctatatctatagtattataccatgtggcttggatcgggtccgaagtactataagcctaaggcggaaaatcttttggttgagagaattgagctaaaatatcaatccagtatataaaaaacatataccgtatctctattcattataagttggttaaaaccattcccaaactcatgataatcactctctcaccaaaaaacaaaaatcaaataaactgatatatatatatataagaaaaacttgaacatttcctcacattgttactctagattttaaaggtgatagtgatacaatggctgataaatgtgctaaaatttgaaattaatttgtccattatgccgacatccatttataagcttttaacatgatactagaatcaacaaataaatatttttattattttatttggaaactattaatgagtacacgatatttacatttacataaattggttgattggttacctgaattttggtagaaattgcccacagaatattcggataagtatttcggtttagccaaaagcagtgtcgtcttcttacacaaaaacaacaaaactccaatcgtcctccctcgtcctgaatccatccatcatccactctcctcttaaaaatcctatctttgtggtttgcaatctctcccacgacgcgcttcatcattcatggctatttgaatctctcttctctctctctatcaaatatgcaaaacccttcaacggtaacccaggaatcagccgcaccggtctttgatttcttcccacggctcagaggtttaacctctagaaatcgatccccgtgttcgaattcagatgggtatgctctctcatcgtccaatgccttgtacttcaatggtttccggactttaccctcccgaaggatgggaaaaaccctagcttccttgagcttcaacactaagagcagtgctggttcgagtctccgtaggtttatcagcgatttcaatagctttattaggtttcactgcgataaagtggttccggagagctttgcctccgtcggaggagtcggattatcgagtgatgagaatgggattagggaaaatgggactggtggggttttgggtgaggagggattgccgttgaatggtgttgaagctgatcggccgaagaaagttttgattttgatgagtgatactggtggtggtcacagagcttctgcggaagccattagagctgcttttaatcaggagtttggagatgagtaccaggttcgtcttgatatttccatccatctttttgggtagaatcacgattgattgatcattgatggatttcagtttgggacttttacaagttttggtagtaaattgaagtatctgtttggatgttcggagaatctctattctgtcttcttagttttagagttcttcgaagcttcagattcagtttacttataaacttgtaattgtagtcaggtttagagtttcttgaattagagaaaataggatttagatgtttggttcatgtaagtggatagcattgcgttacattcacttgatggcttaggaatgttccagctgaagagtgtgaaactgactttaaattaaatttggttcttggaataattaaccaaatacatttgaaagtctagatctttggtactttaagtagtgtgagccattgttgattttgttccgttctaagagtgcttgcgcaggtgtttattacggatttgtggacagatcatacgccctggccgttcaaccagcttcccaggagctataattttctggtgaaacatggaactctgtggaaaatgacttattatggtacatctccacgcattgttcatcaatctaattttgctgcaacttccacttttattgccaggtgaggattaaggtctatagtttggttactccttcataattcatttgtctgttccaactataattatgagaagattctaatcaagagtctttaaatgttcctatgagaaaggagcatcatatttagcctatagcttttttgggtctttgcttctcttacggagttctatcatgtctttttcttttctaatctgataccattgttttataacttacagggaaatcgcccaagggttaatgaaatatcaaccagatatcataatcagtgttcatccgttgatgcaacatgtcccacttcgtgtcctaagatcaaaaggcttgcttaagaaaatcgtgttcaccacggttattacagacttaagcacttgccatcctacatggtttgttgttttatcaaatcgttcatgtggttctcttttcttaatatattgttacaacatgtttgttttgatgtttaggtttcataagcttgtgacaagatgttattgcccatcaacagaagtggcaaaaagggctcaaaaagcaggacttgaaacatcacaaatcaaagtttatggcctccctgttcgaccttcctttgtgaaaccagttcgcccaaaggtcggttttggaatcattcctagctgttctttgttgcttccgactcatccaaatgtaatagtatctgtccgaaaaaatcgcaggttgaattaagaagggagctagggatggatgagaatcttccagctgttttgttaatgggtggaggagaagggatgggtcccatcgaggcaacagcaagagcacttgcagatgctttgtatgataagaatcttggtgaagcagtaggtcaggttcttataatctgtggacggaacaagaaactccaaagcaaattaagttccttagactggaaaatccctgtccaggtactctacatttgtcactcttcataccaaatccacaatcttaggcgtttgatgttagtcactgaaactgtgttctttatgtcataggttaaggggtttataacgaaaatggaggaatgtatgggtgcctgtgactgcatcataacaaaggtaaaccgaacagaaccaagcaagcatataaactgatctatatagatttagtgttacattggttaatattttcttgatggggaaaaataagagtgatttaaaagtgattgtttctttatcaatgtttgtgacttggcttgtgcaggctggtccaggcactatagctgaagctatgataagagggttaccgataatcttaaacggttacatcgctggtcaagtaagttccactctaaaaacttcccatttatatgttggttcaggttttcaattgtgaggggttttgattgtgagagcaggaggcagggaatgtaccgtacgtggtggaaaacggatgtgggaaattctcaaaatcaccgaaagagatatcgaagattgtagcggattggtttggaccggcatcgaaagagttggagataatgtcacagaatgcattgaggctggctaaaccagaagcagtgttcaagatagtgcatgatatgcacgagcttgtccgtaaaaaaaatagtcttcctcaactctcttgcactgcctaataatctatatatgttgtaactctattcattcaaattcaatcactctaatctcctttcttagacaagagtgtaataaacatcacaatattgtagtaatttttttgccctaaatgcaataatcagggccgattactaccaactctttttaataatgataaataagtatcccaattaaattagtttattataactccaaagaacgacattgtttcatgggacttaaaaaaaaaacagcaataaagaaaaaaaacaaagagacacaaaaagggttttgagtattgaccttcttctctcggccgctcgctgaggtttatcaagtgagagccttttctttcggagttttcaacgcaattcttcaggtaaaaatccgatcttttggtctttcaagtctatggatttgtcgattttccttagatctaagttcgtcagcttgtccttgttcttctgattgtctgattgagtgattagttcatgttttaaggttttgtttttgtctgttgtcagagaagcagaagagatgttgtacattatagggttaggtttaggagatgaaaaagatataaccttgagaggactcgaggctgttaagaaatcacagaaagtatacatggaagcttacacttctcttttgtcctttggtctctctgctgatggactttccaatcttgtaagactctcaaagcctcgttgatttagtagattcattactttcccacccagttttctgattaaagttctttgattggtttctcaggaaaagttctatgggaaaccaattatacttgctgatagagaaatggtggaagaaaaggctggtgatatgattgatgaagccattgataatgatgtcgcttttctcgttgttggtgatcctttcgggtacatacacctttctcatcctatcttggtattcgattttatacctaatgtagttagttagataatagatacaatacagtttagattgggattgatgtttgaaatggttttgttggaaatgcaatttgcagagctacaacgcatagtgatcttgttgttcgagctaagacactcggtgtaaaagtagaggtagtgcacaatgcatcggtgatgaatgctgttgggatttgtggattgcagctttaccattatggagagactgtttcgatcccattctttaccgagacttggagacctgatagtttttatgagaagatcaagaagaaccgctctcttggacttcacactctctgtttgctagatatccgagtgaaggagcctacttttgaatctctatgcagaggagggaagaaacagtatgaaccgccgaggtatatgagtgttaatacagcaatcgagcagcttctggaagttgagcaaaagcatggagattctgtttatggtgaagacacacagtgtgtgggctttgcccggcttggctctgaggaccagacgatagttgcagggacgatgaagcaactcgaaagcgttgattttggagcaccgttgcattgtcttgtgatagtaggcgagactcatcccgtggaagaagagatgttagagttttacaaatacaaaagtggaaactaaaagaccacaaaactaaagaagactcttcttatcattactcgcaaagcttcaaggcagagcaggaggaggaagagattgaaactaggaactgataggtgaaatactcttcttcatctctattgactttcgaggttttggtagtgaattttgtataagcatagttatggtgtgacttcgaattggaaaggtggatattgaaatattcatttggctatagattgaggtggattttgtatcaaagctttgtttcagagataattttattttggcttggtttggtttggtttgaggatttgaaaccaaactagaggtcgtttcggtttgtttttgttcggtctggttcttgagggttgattacccttcaaaagatcattgtttagtttatgattgtctccttaaaccaccacacgtccaaagattgtattttattattgcccctaagttagaactgagaaaactttgtaacgttcaaatataatgatgtttatagaaatggaaacgtcgggttaatcagaatttctatgaaggaaacgtaaaataaaaatctaacacatggaaatatccgacttagttttagatgaatcaaaatccgagtcttacttttttcaaagctgggataaagctctggtcctaattgagaccacaatttaaaaaatcatgacttcttttttaacaataattccactcaaaagtcatttaaaattttgacaagtaagccttttaaggaggctgatgaatgatagatgatgcacaaacgatgacgtaggattatttacgtaacgaggctgatgaatcatgaacgtaacgtagttcaccaccattcagaaaagagaacatacataaggaataatatgtctggctaaattgtcgcatgacttgagcaactagtctatagtttttacttttacttacaaacaaatcgatttggtccattttctattagttcttgaaatctctaacagatagattattccgtttggttttagcttttaaataagcttgactcatcatcaacttaagtctttcttaaagatactgtataaaatatatcgctatattaattttaaatggttaatgtatcgatttgtttcgtacactaattaccaagcattgtattcatttctatttttgtcataatcattttttgattatttttttttttttctgcaattatattctttcggctgaagtcttatgtttagaaattttaaattcacgtaaacatttgacctaaaactatcataacagatttaaataattatccaaaattttattttagttagaaattgaacaagtaaagttagtaatttaaccggttatatgaatagtttatgcacatacgagttcatgattaaatttgaagaaaataaaaattaattctccgataggaagagatatgcaaatgagaaaactaaattattctttagtaaaccgctcttacaaaccgtattttcagattaacaaaagagacaaatataaaaacgtatcatgatgatactttcagatgctgatcgtaatgacgtcatcgtatcgacgtcgtcatgtagaatatccgagagagagttttacacgacgacttaagaaagatctttggtcgtctttcttataaggtcttatgataagacttatcactccacataggatcaataaactaaaaacacttcctgaaatatttttccaaccatgttatatttgtttaattaacttttccatgagccctaactcatttcttcactaattatattattgttattcatctcttgttaacaatatccaacttgaccaatatatctttattgttcgtcaactgtcatcgatctatatcactttacgtataggattaatgtggcgtaaaaagataaagaagtttggtccaaatttcaatatcaaacttctagtgatgagaaatttctatttggtctacatcggggaacagatcattccacttatgaatccccattactaattttccattcctattacagacgttttacgtagtagggaatctagtttattaatatacatatcacatagattaatcttgattgtttcgcaaattttaatggttttcggaaacaaaaagggggtacaaagtgagctttccgaaatagtgtagttcccagcatccaaatctctcaaaattccttccacaattagaacgattgttcgttcgttcgttttcacaatgtatctcgacctcttttagcaagagtttgctactaaactcgaaccaagtggaaacatgtgggttttgcaatctaaattgaatttgttttgtcaaaaaaggttcttatatttagtacactgtaaaaaatttcgtttctaataacataaatacctagtatagtgtaatggtgttcagagttagcatgcaaacttgtgttaggaaaggatatcaaaagtctcttgtttcaacaatttttattttatattcaaaaattattatgatttgatctttcaagttgattcaattcatgaagatcacataaagcttcttctctgaaatgaatgtcacatggaataattatgtattgaagagcaaaaaccgcatatagtaacctagcttaaaccgaatatacccgaagtcaagactttaatgagaatcagactaaatcctgaatttatttgaaaacaaatcatatgatttggtcttcggtccggtaaaaaaactcagataagtttgaaaacaagttttaatatttatactatatgattccgtcttaatcaaaattgtcaacttacatcaataaaatcaaaactcattttaactagattctaagaatctcatcgaacaatcgatctttgtaaatcttcatggaatagtggttagcatttgtatcattgagtttgaaagaaacggaataattaaagatgacactaaattcacaactttgaacaaacaaacaaaaaaaagtgacaagaaaaatagaggtcggtgtcggagccgcccaaggtggcaacttgttcacacctcataataaaagcttctcacaagttggaagtcgcggtcgagtccagtcaagattttgttgcccttttcccgtgtgggctcaccaccctctttgtcttcttctccccaaaaattttccacgttttttgtttcactctctcaatttatttatattttttttgtcggctcatatttaatttgtgttaattaacacttccttgattagaaagtttttttgtaccgacttaaatttatcatgcaatgtgattggtcgctttcccaaaacaatctctcaacgacaaaaaagtagtaattagtaattaaatacattatattttgttgttaaatagtactcattctatttcaaaatataaaatatttaagtaaatatcacacggttaatgaatttaaatatataactcaagtatagtactaaaaagaatactttaacaaacaaacagaaacctattgtacagtaaaatatcaatcagtgaattattaatcaaatagtaagggaaactaggatataatagaaaaagaattgccgacctacaaatcagagtcaatggtcaagcaagtcaagggaaagttcgtaattgttatggatctggagtctggacaaattaaaaaaaatttgttaaatagaagaggatataaagggaacacagatcctacatattgaaatttatgtatgacgtccaaatttttcttcagcatgggacactgccccgccgaaattattgatttttcggatctttcttctacttgcttcttttttgtttgcttttataagttttgcatagctaattcttaatttcttatcatttatttctagttggtagagacttataaattgaacgtttcaagtctttggacggtatttgagatttcttgtaatttcacttgtaattgtaccacctaacagtgactaaagcagaataaattacgattcgtatacaacaaagtattcaaatttctaaatgtggatatattattgattttattttgggaaacatgtttatgataatcacctatatctcctctatagtctactagaaacgatatttgtcaccttcatcgtacaagactataatgtataattctatccataatgaacgatctagtttttaacatgtactatagagatgaatgattacgacagtaaatttaacccatgcatacgaaaatacataccgatagatataacacaattcagaatgttttacacaatcccatatttttagccaatcagtgtgattttaatagacagctttctatgtcttgttgtgctttttcttcttctttttttcccaaagtctttaatgtcttctggactttatagaagacagctttttatatgttatcttcactttcgaacgactttccttcctaacatatcccaaaacctatctctttaatttattcctatcgtacttacagcttttattaaaaaaactttcttattttaatcactaaacaattaataaaacatttatttatgatttttcattttcgttaaagctcttttattaaaaacttaatcacaacaaatttattaatcttaaatttgaccttaggataaaatttatatattaatcttatatctgttatacattaaataaactttaatttctgcgcaacaaactaatttattatttatttcttgtctctgtctttgtagttttagtataaataaagccattttgctccgaggaacttctcattcagtcggaccaacttgtgaccgaagaaagcaaattgagactacgcaccaactagtcctttggtttgtatcttaagataaaggtttcttttatggacggttcttcgtttctcgacatctctctcgatctcaacaccaatcctttctccgcaaaacttccggtaagtccggatttcgtctgatccattttcccgaaatctaagttgatttttgtatcccttcaatttctatgaactgggattttgggaattaatcatgggttcatttcaaattttcgtatttcagaagaaggaggtctcagttttggcttctactcacttaaagaggaaatggttggagcaagacgaggttagttctttcgtcgaacacttggtgtgcactaccttcgacttcatatacttgttcgaacattcagcttttatcaattctttaacttcactttagtactttacgaatcaattaagatgggtctgagtttgaatgtctttgcatcgaaatgaatcggtgatgatgtagttagtataaagtctgaaactttacataatcaatcttgtttggaacaaaaaggaagaatctttttagtaatttgatctttgtggtggtaatgaacagagcgcaagtgagttacgagaggagctaaacagagttaattcagagaacaagaagctaacagagatgttagctagagtctgtgagagctacaacgaactacataatcatttggagaagcttcagagtcgccagagccctgaaatcgagcagaccgatataccgataaagaaaagaaaacaagacccggatgagttcttaggctttcctattggactcagtagtggaaaaactgagaacagctccagcaacgaagatcatcatcatcatcatcagcaacatgagcagaaaaatcagcttctttcatgtaaaagaccagtcactgatagcttcaacaaagcaaaagtttcgactgtctacgtgcctactgaaacatcggacacaagcttggtaagggattttgtctgtgaatcttttgattaaagagtcatatgtttgaaattgcatagagacaaatgactaagcagagtgtaactctgcagacagttaaagatggatttcaatggaggaaatacggacaaaaggttacaagagacaacccgtcacctagagcttactttagatgctcgtttgcaccgtcttgtccagtaaaaaagaaggtaatttacacacatcgagtttattgtatttatagcttcatttgtaattgtttatctctgcttgcttcttcagttgtctaatgatctgtggtattactgttcaggtacaacgcagcgcagaggatccatctttacttgtagcgacatacgaagggacgcataaccacttgggtccaaatgcttctgaaggggatgctacaagccagggtgggtcaagcacagtgactttggatctggttaatggctgtcatagactagcgttggagaaaaacgaaagggataatacgatgcaagaggttctgattcaacaaatggcgtcatcgttaacaaaagattcgaaatttacagctgctcttgctgctgctatatctgggaggttaatggagcaatctagaacatgaacgtttttagtgaatgtattgtttttgtttgtttagaatgattcttcgttttcgaattgtgtctttcgattaggagataaaagatgtatataaatattataagtagatgaagaaatcgtataagtattcgagaaactttaaatgtacgaattctatataaccagttagatgtcgtctgaatactgtatatgaaaattttgaaataaatgatgtggttaaaaaagggtcaccataaatattcaatcacaatagtctctttcatttattggaaatttggagtcatttgagaaagaaataagaattggacatcactaaatagtatcttaagtattctttaataatgtgttacacaagtaaattatgtattaagttggtaatacaatgatcggaaaaagaagcgcaaaaattcaaatgagaaaaatcaaagtttccctccataaactcactctgcaagtctcgtgattctcatttatttcctctccccatctgttcatagctctctgttacgactccgtcccaccattatcaatgtctatccgatcttggtccctcctacgaagccttcttccttttaaatctcgtctcttgttccaaacccaaaaacccatgattattcgttttctgtcttctcttggttttcaatggaaggctcgcggcggaggaggggagatgggtgcactatcgtgcagtgttatactcctaggagattcgtgggccggtggctttcggggttgagaagttccaaggggaagagagatgcaggggaggaacaagaagatgacaccagaaggtatcaattagcgcctataaggtgttcgacgagtttaaatcagctggtaatgcaggacaataagcagaactgccgcctgaataagagtaaagagccggagactaatacatttggtgagaatcttgtgtttttctttttcatacacttttaattctctggaaatagcctaatgatcattgaacggtaagattgtctttagaatttgaaggagttccctttttctcttataggtaaacaagacttgtctttggtgggttatgtttatagacttatacttagttttctttgtgcagagtcacaaagcagagagtcacctttggaagtgggaattggttcttttttgctctatcttgttgttgcaagtaaaaccgagcttgataagatgacaaacctgcgaatgcaaatggagatgtttcttcttaatgcaaaagaacaactacagaagaaggatacacctatgtcttcaaatgaagcaagcggtttccagttttctcctcaagaattctcgaatttggcgtcatccattttccaagagtcatcatcgagtgttcttcaagaggagtacaccgaattcgaggtctcagagccagaggattatcgtcgaggaacagactgcaactcaaaactccaggctgaggtaggtaggttacctctgggtgaaaaagcagaggatagacaaacaaagcatcagattcagagacaatgcaaacttaaagtacttcaaagaaaacccttttatcttcttaagttgggtttcaactgtttaagcaattatgaaacaggctcttgattctcagacttgtggttcttttgtgtttgtaggacaatgaggtcacaaagagtcatataccagagatggtggtgtcagatgaaagatatggagtgtgtccgtacgaactagacaaaaagctgcatgaactactggagacaaggcaacaagaagagttagtgaagcttgagactgctctgaatcgtgttgaacgcagactacaagagaaagaaaccgaggtttcatggtggaaagacgcagcccgcctgcttgcccagcgtgttcctgaatcttctcggtctggactagaatggtgcaacccagactcttccacatgttcagagcgatctgttccaagatcttatgaagcatgttcgatacaccgcaccagtttttctagatgaaaaaatccttaagtggaagaggaagagtttagatttgctgttacagtgtttgcctgaagagttcttaagcatttgtgtgaagtttacttttagttaaactagtagccactacccctgtttggtgcaatgttatacataccacctgaaaatcactatccacggtaagaattgcactgtactgaatccaatcaagcttatttattgctgaagagaagtgtttgaacatttttttatctcaatccattaagtggaagagcctagatttgctgttacagtgtttgtctgaactctgaagatcttttgtgtgaagtttacttttttgttaaactagttgccactgtaactgtttggaattgcactgtatctttatccaatcaaacttcttctgaattctacactttggcctttcaacattataatggaatcctctcacagaaaacgaagaaactacaggatagttaaaaacttgacactccctaatgaagaaaaacagagtttgacaggataatgtcattgcagagatctcatttgcgcatagatcggtggaattctttattgcaagtaatgagtgtcatcagtaggtttttcctcaaaaataaggctctcgttgagctgttggcagcttcaactcagaatctgaatcatcgagctctgaggctggcgtgaagtagcaatccaccatgtctttgctcacatcttctaggcgtggaggatcccactgcaaatattaacaaaccacgaattagaacgtaaaacctggaacatgaacataagctaaaggagttgcaaacgtctaattttgaggctgatatgtttgtatgcacctttggagcaaagtctttatctaccaaacgggctcgaataccctatcaacagaaaacaacttcaatatgtgcaaaaaaatgatgctttaattgacaaattagtgaaatattttacctcgcaaaagtcgccagagactacttttgagactccacaaatggatatacggtattcatgtgtgagacattgatcaagggtttggaatctaccttctcgtatctgagaagagaagaaaccgccagagtcagaaaaatgaaatcctttttgagaaaggagaagaagaaactaaaaggacttacagattgcaaagtaatctttaagctcaaaggtgaagcttctttgatctgtttgagagttttcttgcaccattcattgcacgaattagcagcttcattttcctgaggcacggtttaacataaaagcttagaactttacaaaactctcaagccaagtcgatccaaagtcctcaaaattgaaagatatcatgcttatgttagggaaaattttctcaccatagcttcaatgatttcttcaacggtatcaagcccaaaatatttatcaatcaactctatcctgatcaaagaatattgggttacatgattgtgggatattcaaagagatttgaagatatggagaaaaggtaaatgatttacttgtgcagtacgctgctactgtcagggtaaacaagatcaccatattgagcaagagaatcctcaatgacagcaggatcatcggtcaacagtttaccaatcctctcttcaatcaacggaagtctctgccataacaacttatataaggaatgtgcttaagaggaaagaacaaaacatgagacaaggtaagaaaagtgcatcacaccgcgtttaagcaatagtgggtggcaaggccacatgctatcatttcgacaccattaagtttctgccccgttagagccaagtattcccctgaacaagaaaacacagaaaactgcttcagaaacaccaaaatatcgcagttaagtatttgtataccaatcacattcaaatctaaaatttgaccatcattttactataaatatatgcatagaatatggatctagtgatcagcctaaggtgaagttcacctaaataaccaggaagccgtgaaagataataggaagctcctgcatcaggatgaaaaccaatttggacctctggatgggccaacacctgcatacgcacagttgttcagaacatcttcaccactaaacttccaaagtacaagaaaagaaacagtttcagacaaagagaaatgggctactgataattgactaaggcaacaagatatttaaaatacagagaaaatggctaagaaatttaactacttttcttaagagactctaggatcttatgtagtcactgactttgcttttattactgcgtccactcgaagtaaaaaatcagtgatttgtaataataaagcgagccacatacagttttatctgtagccacacgaaacatccctggaagtgaaattccaccaccacaacccatggtcacaccatccattattgctatctgcagttaaacaaaactcttgatgtataagaggcttaagagcaagaattaaagttcaaaatatttcaaacacttgccttttatctacaaaatcagtttcatagattatcgagtggacacaaataagtaggttagctctttctagtcacacaaggtcatacgaaccaatcccatctggtattaacaaatagcatcgaaaaaaatggctaggaatcttacatttggttttaaatacgttccttggaggtatacaaacttgtacaagttctcgaaaaagagtttagattcttcagtatttcctgtgcaaacaaaaaagtgacaatacatcagcaaagcttctcagtaacttcaccaaattaactctggtgaaagggacttcaggctcacaaaacctttacaagtatttaacaactggaaactaatacaagagatggaccttcattgatcgagtgataaagagacaagacatctgcaccagagcagaaagttttaccgctacccttcaggaaaaataagaacagtagcttaattgagtgagattttggtaaaaaccaggcatcagaaggacacaagcagcagcaatgaatataagtaccataccttcatcaaaacaaaggaaatagctgggttctcttcccatgattcgtatagcctctttaaccgaccaacctaccaaggcaaaagtttttgaagcataactaaaaaaactaaacgagctcaagaaacgagacttcttaatccaaaaagactactctggtgaacacaataccataggcgcagaaagagcattgagagaagatgggttattgagaatggcagctcttgatttagcttttccttccaccagaaccttcaattacagcaaaatctcaaattgataaaaaggaagtacagatttcatttacactcccagaaaatcaagtgattagaatcccatttacgatcaatttagataacaatgttaaagagttccacaaacagactatcaaattaagcacatttagggaagatccgaaacaaaagaagacgaaaaacctggtcttcgaaatctgcatctgatgcggaatagtttgggagagcagaaaagcgtcttccataagaaacagaccgaacccattgtaagggttcactcactctcctcaaagctttcactgtttgcatatctctgtcgctctccgtcgagaagacgcctctgtgtttccgagggttttgggttttgcctctcaagctatggccgccggtgattcctagccgtcagatcatttccacaatcgaaattgaactagtctaaactctaaaacgtaggatcacttatgagcccaagattgagcccataaggcccaagagatcatagcttagcccataagatctgagttttagtctcactaatgtggaatattttgatgactaatgaacaatgattgacaaacaaacaacaaaacatgtcgtccatcactttcactaatcgcttaaagttaacgacaacaaattcaaaacattagtcatgtaatgaaacagttaacaaatctttacgattaaagaaacacataacacaacttcatcagttttaattttaactaccacaaatcctaagatcacttataataagttacaaccataatagcttctctttacaaattctgtttctccccaccgattcacgatatcgaatgtctgcggcgtcgggaagacgagctagaagacttggctggcggactttgtgagcttccagaagaaacctcagagctcttgttgctaatctctcctttcccaggccatatcttctcaaagatcctccttgacctcgacggcatcagctgtgcaccaccaccactcctcgtgctcttgcttcctctgcttttcttgctcagctccaccttcttcgtcgcttcttctcctttgttctcctccgtcttctcaaccggcgagtgtgacgaagccgcaacagacgccacggggctgtgatttgctcggagctgctcaaagtagagaacttgcaccaccactcgtagtggaagtctctcgttctgtgcagcgtgcgttgatgcttcatttgtcagtttcctcacgtccattaacccacaaagcctcttcttttcggattttgttagttcgggatgttcctacaaaaaccaacttcaccgattacaaaaatgtccaaaaatatttcattcttttcagagaaacaagaaactctgttttaccttcatgaaagtgtcaatggctttgtagagaccgtcgtgtatcggcctagctgattccgggactaactcagataactcaacaaagctagagagtgtaagttcagagttaagagcgagataagcatcaatcaatcttcctacactcaacaaaattccatttcctaaaacaaactccttgtaccggtcatcttcagatacacgtttctcatccgccatgaactgatcaacaatccgatggactaattcgacttcatggatcagcaaatctttaacggacgcttcatgaagcttcaaactcacgttctcaaccaaatcttctctcaccgtctcatcagctccaaccaagatcgaaactttaaggagttttagcaagaagctgcaagaagagtagctcattgctctgtttaccttcggcaacaagaaaacaaccgtctcaacgagatctttgtttgaagaagcttctgatgtcaaagactccatagattctggtaaccaccttgcaacatagtatctaagagcttcagcaattacgccattattcatccttccactagatttcacaacacttatcaccctcttgaacatatcaatctctagctcacatacatcttcgacccaccaatctttcggaatcacattctcttctctcttctcccgatgatattcgactatcttatcaggtccagataacttcctgttgaatgtataagaccaagtgatagtctcagggttcaccaagatcttagctgaaacagaatctatgcatctaccaacaagcttcagatcttcagaccaaggaagaagagatcttgttgtctgaagcacaatgattgagtctttccagcttctgaatatgcctgagttgaggaaaacttcgatcttgtatatgaggttaccgcggtcagcatcttcagtcatttcaagatactcagctgcacatcgcaccgcggttatgttgtaagcattgagcgtaacagtcatcccatagcaaaacttggcacagatctcaaacgctttgtatcctcctggcatgtctagtatagtgatctcatcggttttttcctcactcgcctcaaaaaccagtcgctgcatccgattgctcttcgatagcagcgggaactgaaaatgtaacattgagcataaaagagacatctctaataaaaagttgtaccacttaagaatccctcagtagaaactacttctattatcagcattacaaaaatgtaccttatggaggtgaaatgtgacctcgccaacatgaatagtaacatcgctgtcaagatctgaaacggcgtacctgcaaggtagaaatcaatggccagattaaacattgaaactaagaacataatcagctcaacgagaactcttacatattaattagacatttctcttttcttaaacatttcagatgttatgtttacattcaaaaccatataagcacatgcatgtttatcaagtttaactcacaacctaagaaaagtccaattgttgcctaaaattcacttacaaaacaagacaaaggaaacaaagattcttagcctagtttagaatatccagaggtcaaaacttggaagagatgtcttagatatttagagaaacaaagcataagcaacaaaagtaaagagagattcttcactttctaaattagaagaaaactcatcatcatcatcattcccttttgctttccactctttgctcttacaaatcaggaccacaaaacaacaacacataaacaaagacagatcatctaatggatggaccactcctgaaactcatataccccatttcttgtaacttttctagtatttcccgcaaaaaaaatatgatgagagaaaccaatcacaataatggtgatgatgatgacaaacttatcctggttttctatctctaagatcaaaaccagagtattttaactggcaagtaacagtgtttaagcaaatcttgaccaagtttagctatctctgttcatatagagcaaatgaaaatttagcagggaagtcactgaaatctgtttttaatagcttgtgttaaaaaagataggaaccaagagaagatgggacatatgtttctagaaatcatacaagaactaaacagaggcaatacatgtggagataaatgaatagaaaagagaagagagaacagaacaaaaacacagagaacagaaatagtagaagattcatttgacccatcaaattaaaaaataagataaaaacaaaataaaattatgcttacttgacgaatttgccatcagattcaaatgtatcgggcttagaccctagcttcatgaacttcatatttcttcgtcttgtttaccaaaaggaagacacttttgtttgaccctgaagcagctttaagaagcttctactctctctctttttagaagaaccgatcaaatcacagaagaaccagagaagtgagaagaggagaaaaaggcagaaaatgtttgttagttaataaaagaagaggttggtgttggaagagggagagaccattaatggaaaagggatgaatgaaaggagacaagagaaaccaaacccatgttttgcctcactatccttttgcaagaaaccaaacactcctcggactacgggatctttttacctctcatctcaactaaccattactaacagcatttattggtctctcaactccaacacagaagagaagaagaaccataaaagttttcttttttaatttttcaggaaaacaaaaagctttagaaagataatcccatcatcataatcactcacacacagagagaagcaaaaaccaaaatggcgaaagatagagagatatatatatatatatagagaaaaaggctttgtctttgagggaattaaagagagatagagagagagagagaaatgaaatcagacgccgccaatgcttttaaagcggggactgatccgctggagatcttctcttcttcttcttcttcttcttctctgtttggctcaaatctcaatgaaagtttatttatttttatagttatatatgtatagtagtagtaatagtggatctctttccttagagcagcttcgggaagggatgaggaatgatgatgatttattttccttctgacgaacttgtctcgaacaattatgtatatacttatattctatataaagggaagcgagaaaaaactgtaggggaacaagagaaaagggagtgggaatctagcttgcaaatattctaaattagccagctaagttgtttgaatgttactaattaacaactgtttttattaattatcccctttctttattcacttccatttattctttacgtcttaagttttaatgtgtgtgtaataatgaagtatgtagtactttattttctctgtagattagagatctctccaattactatatagtctatagtctatagcattgtacagctcaattctcgtctcgtgtagtctttaattaaccctatgtatctgcttctatacatctatatatgataaaggtaagtaagtacacatatgatgataatattccaacactacataaataagtacattggctaaactgagtcatagcctggtttttggttttcgctcaaaaacttaggcactagattaattttcccaaaacataatcttttgttatatactagtagtagataatagtaaaaaatctcttaacaaaacaatatttccctgcatcagtcaatagcagtttgcaccaccatacttgctttgactcattccctactccgtttgctttagttccgctacttgtacatcaacgaatgaacactcgacacgtgtaatcagtgtttcccttcttcgtactagttggtgtgaattgacgcgccggtacagtcttttgtagtccgtcccaacggaacccgctagccgagagagagagagagagagacactttgacttttgtttccgttattctagatgctcacgagtcggtcagactttgcattttcctaacatttgactttgcatgcaaaaaaggcttttctaaaacacgattagtttctttataatgtcatggactaatctgctactgtactataatagaaatatcaaacaagtcaataattgtggaactaaagtatgcacaatacttataaggggaatcacactcatattgcatggccacagataatagatgaaattaactcggctcgacaaaacaaaacaaaacatcaactatacttctaattctaaatagttgagatgactctaataattgtatattagattttactttttagaaaagcaaatgtcctaattttatatgaacgtcattttgtctgaatggaagcttcatgtaaagtttctccttttgatgtcactatgaatatttttcatacccatgaatatctcgtgtctcacaaaaatcccaaattaaaataatcgaacatatcaacatagtgttcacaacaagctacagtatactcagtcggtcagtataataatctaattaaagattgttgctaaaccttatggataggatggatacttattattcgcttttggattatgcagaacaagttattgtcaacaaaattggagtatataaacagacatatcatcaaaacatgtgtgttcatttgtttgttttctcttaaagagagggtaaggtgacctgctacttgtggtttcaattttctcgagacattaacaaaaatggcgtagtcaagatcttgattggacccgatttggtttagaaggttttaatgtttttagccatttttatcggagtatgtaacttggtggggtctgcatgtcaattttccttacgtgccgtagctgtttccacgtgattaattgctcaattatataatatgaacacaaaacacgtatcgtaagagtcgcaacgtaattatggagatgtaatgtatattggtcccaaagctaagtagactaagtagtaaatgaaggttgacaagcatgcatgcttcccccagtggcttaattatttcaatggtaactaattgctgtgtgtctgcgtcttcgcttaaaagataagtacacatatatacaaatttgacttatccttatatgccggtcatatgtaactcgttatatgatctgttacctccgtatctaaagtcttcgagttggttgaatacatttgacattgtgactgcgacaaacatcaactaaagaataatttgttttatttcactattcttcatgttatcttttcgtcttccaaaatacttgattcagaaaacatttcgttccacgcaataaaagatatatggtctcaaatacaggaatattaaaagtaccttatccttaatgcttatgtggctcaacttttttaagacctacattggtttaaatattaccaaaataatccaaacatgaacattgaaatacaacgctatatagatatagaaatggatacgaggttttcatccgttgtttgaatctaaagtacgtaaacatagagtatagtactataatgcaccatagctcctccctaatacgaaccttattttcttatgaccaatttcgacatttgattgaccatgctctattctccttttatcaagaatcttagaattttagtccataatgctttcgaacctaaatcatggcagactaaattattctgctcggaaaaaaaaatacaaaaaaaaaaaaattattctgctcggctacaatatttattagttgatgtattctttacttgcatgctgcagattatatgcatggttacacagagttcaaaacctattaagatctcacactcatcactccataatacgtattaaaaacttctatggataatgatgaatcagtctcgcaaaagaagattagtgtcctcgccatcatacacgtagccaaaagagttgcacgtacggacattatcatatggggtctaagaggggtctattattagaagtgtaattaaaacatatttcctcattggatgatatctataatacatagatgcataggtgagacgttgaaagcacagaagaaaaagcattggcatgtggtttatgagaaaagactagacgtagctccattattatggttgcattatttatatttatacagtctacctcttttacattacatacaactgcatccatatttaatgcactccccatgttattatcctctcatttactttgagatttcttcgttgcaaacttttttcgttgtttttatcttttttcgagatttgtataaaaatggtaatgagagaacagaaatacactaaaatgtaatgggtgtggtcgtgtggatcggatgagtggaaaatctttctatacaaaaaacagaaatttttgattttaaattggtcatcagtcttaagatcatacatgcttctatcacatcccttcaagttcgattcagtaacaatctcacatgtatgtatgcttaaggttaaagtttcaaatccatgcttaaatggttgaaaataaataataggaaaaatgtcaaaaaatgcgctaattttcaaatttgggacgaaaaaagcatgaattttcgaaatgtcatttaaatcttaaagtttgggttgacttcttaaaaaaatgtctaagttttgttgaccttgcattttaaagcgtgccgtgaaatttccgttgagctagaaccttagatcactggatctgtagtcaagcattaaaccgttgagctactcacgcttttggtgtttacttaagctaatagatatatatattcgtacatgtaattaattgaaaaacacaaacctaaaagctccattattgcctgcgtaataaacagcgtgaacaagtccagaaaataactctgaatcagatgtaatcaagagttcacaatacttgaaatcgacaacattaaacggatctccaattgtataaatccgagaacggtactctccccaaacaaaccatcattggacatagacgagccacacgatctcaacctcacgctcatatttgacgtgattccacgccacctgctcacgctgttttcttctcaggcaacaatggagttctattagtttcaactagttacatatatataagctcaatcaatgttgttacaagtttacagtagctccatggtttacagtagctccgtggtttacagtagctccatggttgaaggcttaattacagctgcagggaatcgtcggtttgacactaggttgtgtccgattttcttcttatttttaatttttaaaacgacgtcgttttgaactgttaacggaaagttgactccgttaattttctgttaacgcaaatttcacggcatgccttaaatgaccacgtcaacgaaacttagacattttttaataagccaactcaaactttgagatttaaatgacatttcgaaagttcatgcttttttcgtcccaaatttgaaagttggcgcatttttcaacatttttcccaataaataatacatcaaatgacaaaaataaattgactggaagactgcaaatggtatcaaatgaatatgtaccctaaacagagaattgatggaatatactgtagtcaatatagtattgcgtttgtatttttatgtcatagagaacataaaaagcatggcatatacctataacacaaacgattactcttagtgaataatttaagacgacaatccggaaacctcacatttaatcgaaccgtggagaatatagtcaatccaatcgaaaccaaatttcggttctgagatgagaatgctttttattgtttgatcgttgagatatgaatgtttaacgtcaaacgactaatagtaaaggtttaatgttgaaaaataatagaaagataattatagacaggcgtgagcataaggcatcataaacaaatgatggtgaacactgactatgggtccaaacctccataattgcaaccttgtgcttcttctcttccttttctcctttcttcataaatttctttataatttcctactcttttttttttaacttcttttacctttttataagtagacgaaaattagtttttacccttagttttatttgtgtaaaacttacttgaattatttggaatgtacaaatagtttccgcagaataactttggtcgttttcaggtctatctttatcttattgttttcttcttgaacatcatgaaataaaatgatagaagactccaccaatatggagaagactcaattggatgttttgtaatagtggtgtgagtttcgtaatagtaagctgtatttgccaaatgacgaaatgttatcatatgggtttgaggaataagtacacaaaccctattatccaagtaaaaaataacgtggccatttgttttattttgcacaaaacaatgtatatatataatgtacgtatctattaaatttgtagctctaattaatatttacgagtgagagagttgattctaatgacgttacataccaaacttatgcaaaatctcatttaagtcattgaatttctatctttttgttattgaaaaattggaaagtgaagattttagatatttaattgttagtcatgagttatggcttatggacgagccgttagatatgtttctaagtagtggatacttgaactgaagcttttagtagtagtactttgaatgttttatcagaattgattagaaagtaaacgatgatcagcctaatttaaagacgaaaatgttgatttataaataaaatgtgtgcagttggtgaggagagaaaaaaaagtttgtcgtccaggttttatgctcataaagcaacacatgagtgtttctacctaacagcctatgtcaatacacttacttttctgggccattaagtggactcacctaattttttcatatttataacgttacgatcttattttatgccaatcaacgttttttaaagacatgcgaatcaccaattgtctcatagaatcaacttgctattattttgtagttgactaaaaaattactatttctttccttaaacttttatttggcacttgacagtaagtaatcaagaccacattgccgattcaaaataatcacaccgttcgaaattttcaaattgagttttcttgttagagaatttaccctaaaactaaatcaaaaccaaactgaataaattccataaacaattggaattttctatttttcattaagactggaaatataaaaacgtaatcaaagtcatatcaaaagactgcaaaaccggatttgtagtctttgaatgccatgcatgatgatgctctacacatcttttaggatatggcccaaaaatattaatacgcaaaagaagcccacaataatggccctacttttaagcgacataacacagagaaatgtagaggattcggtgatctaaattatacgcatgcatttgctacacaagactactctattcctcccattttattcttctgcttgctctagtagttgacataagccattcttggacacgttatgttattttattacaagtaaataagaagttccaacaagagcatgaagcaagaacaaaattacaaaagcaaaaaaagaagaagaagataaaccctttaattcttcccttgaaattttactttcttggatgtgtatcttcaggtttagccgtccctgtggcagccttagctacatcagtggcagtggcttccggcttcttcttagcatacataacagtgtacatgatggcccccgagatagctaatccggctagagccatcgtcgtgtaactgtatggcaagttacggcgttgatgaagaacaccacctggattacttcctggcggcctctttgatgactcaacgccggcagcttttactccctccgagctcatcttcgtcgtatctgctgtttttctccagtcttcttctccggccatgcttatgccttcttcagtatttttttggttgggactatactaatcatggaaaattcagctttagctataggtttttggatatagtaagagtcacgaagacacgtagtgtcgttggagtttgttaatgtgttcaataagggacacctagctgattctctttattttctgtaataaacatattaggcaggtgtcatgccttagaatcgtaactaagccaggtgccaaattgggtctggacttttaactataatcaaaatttatgcccaaagttggaggtttttgtcttctgcttctcatatgggctttaggcgatatgtcttttattcatcttttatcaacttcaaggcccaataaacccagttcccactagcaaacaaaaagtaaagtacaaaaacaaaaaacagaaacagcttagcttgaccagtcttcctagaagaccgtgaaatcactttctctatcagagttcaagttttgtcgctcaatcctaaccgttacgttgcctttatcatctctccaacggatacattaacatttaccattttttccttttaatttttcgtaattcctaaacggctagtttccaagtcctctacctttatataaaccacacaagatccacactctctccatcctcaacacactttaaaacacattacacactctaatacttttaaggttttagattctaatcaatggcttcttcttctcttttggtcaccatcttcctctgcatctctgtcttcttcttttcgtccgtgaatgcaaatgaggttaccgtcggtggaaaatccggtgactggaagatccctccttcctcttctttctcctttaacgaatgggctcaaaaggctcgcttcaaagtcggcgactttatcggtaaatccataattttcaacttttttttttcaattagacattttgtgtgatcttcaatatactctgtttctgacatcgtcacatgtttattacagtattcaagtacgaagccggtaaagactcggttttgcaagtgacacgagaagcatacgagaaatgcaacaccactagccctaaagccagctacaccgacgggaacacaaaggtgaagcttgaccaagctggtccggtctacttcgtcagtggaacagagggtcattgtcaaaagggtcagaagctacgcctagtcgtcatcactcctcgtaactctgctttctctccaggtccttcgccatctgagttcgacggtccagccgtagctcctactagtggtgccgctaagctcgccggcggatttagtgtcgtatttgggcttgttcttggattatgggccttcttcttttaaaagacaattagtcttaattctatttattaattttggaatataaagtagaaatctttgttatttactacattaaatttattttaatctaaattgttcttcctctttttcaattctggataaattagttggatctatcaacaatcaacaaagaaaacaaaacaaaagtgaatgagaattttgaatttagtacccaaaaaggtaatttacagcaacacaaagaaacctggactgtcgtgaaaagaggcctaaaaatgggcctgaattgggcctaaagatattttgggagggaagcaaaacggtaaggatcgagtggagcgagtctgattttatcctctcggcaagttttttattattctgcttcgaaaattctttcatcaaaaatctccggttcaccgaaatcgactccctcgcgctcttttcagccggtgaacggagacgaatcaaaatgctcatagctattcagcacgtgtttgtgttttgttagttatatctgcgccacttgaaatgtgatgaatcatcatcgttaatctctgttttcgtttcaatttttgccggagaattgaattgttttgcttgcttggcttatctctagaatggtcgcgttactctgctctgcgagtttgtgtggtgatatatcagttggtgatgcttgtcttgttagtaacatcaaagcaaaatgtcgcgataatttggttactggaggattaaagttccacgctttgaagattgggtctcggaagaaacactggagaaggaagagtatgagatgtagtgtagtctccatgaaaagttctgacttttcgggttctatgataagaaagagctcaaaacctgatttgtcatcgagtgaagaagtaacgaggggtttaaagtcgtttcctgatactgattcttcattttcgtatttcaaatcagtggctgggaatttgaatttagttcacactactgagacttgtaactacatgcttgaagctttgagggttgatggtaaacttgaggaaatggcttatgtgtttgatttgatgcagaaaagaatcataaagagggatactaatacttacttgactatcttcaagagtctttctgtgaaaggtggattgaagcaagcaccttatgcacttcggaagatgagagaatttggttttgtgttgaatgcatattcatacaatgggttgattcatcttctgcttaagtctaggttttgcacagaggcaatggaggtttatagaagaatgatcttggaaggttttagacctagtttgcagacttactcttcacttatggtaggtttggggaaaagaagggatattgattctgtgatgggtttacttaaagagatggagactttggggttaaagccgaatgtttacacctttacgatatgtattcgggtgcttggtagggcagggaagattaatgaagcatatgaaatactgaagcggatggatgatgaaggatgtggacctgatgtagttacttacactgttcttattgatgctctgtgtactgctaggaagctcgattgtgcgaaggaggttttcgaaaagatgaaaacaggaagacacaaaccagatcgtgtaacttacattactttgctggacaggtttagtgataacagagatctggattcagtgaagcagttttggagtgaaatggagaaggatggtcatgtacctgatgttgtaacctttaccattctcgtggatgctctgtgcaaagctgggaattttggtgaagcatttgatacattggatgtgatgagggaccaaggtatcttaccgaaccttcatacatataacacattgatttgcggtcttctaagagtccaccggttggatgatgcacttgaactgtttggtaatatggagtctctgggcgtgaagcccactgcctatacgtacatagttttcattgattactatggaaagtctggagattccgtcagtgctcttgagacttttgagaagatgaaaaccaaaggaatagctccgaacattgtagcctgtaatgcgtctctctacagtctagctaaagcgggaagggaccgagaagcgaaacaaatcttctatggcttgaaagacataggactggtccctgattcagtaacttataacatgatgatgaagtgctacagtaaggttggggagatagatgaagccatcaagctgctttctgagatgatggagaatggttgtgaacctgatgttattgttgttaattctttgatcaatacactttacaaagctgatagagtagatgaggcgtggaagatgtttatgagaatgaaggaaatgaagctgaagcctacagttgtgacttacaacacattgctcgcaggtctaggcaaaaatggaaaaattcaagaggccattgagttgttcgaggggatggtgcagaaaggttgtccacctaacacaattactttcaacactctctttgattgcctttgcaaaaatgacgaggtgactctagccttgaagatgttgttcaagatgatggacatgggttgtgtcccagatgtttttacttacaatacgattatctttggtttggtgaagaatggtcaagtcaaagaggcaatgtgtttcttccaccagatgaagaaactggtttaccctgattttgttacactctgcactcttctcccaggtgttgtcaaggccagtttaatcgaagatgcttacaaaatcatcaccaactttctttacaattgtgcagaccaaccggctaatcttttctgggaagacttgataggctctatcttggctgaagctggaatagacaatgccgtttcattttctgagagattggtagctaatgggatttgtcgagatggtgactctatcctggtgccaataatcagatattcttgtaaacataataacgtctcaggtgctcgaactttattcgagaaattcacaaaagatcttggtgtccaacccaaactcccgacttataatctgctaatcggcgggcttcttgaagctgatatgattgaaatagcacaggacgtgttcctacaggtgaagagcactggttgcatcccagatgtggcgacctacaacttcttgcttgatgcttatggaaaatcaggaaaaatcgacgaactgtttgagctatacaaagaaatgtctacccatgagtgcgaagcaaacacaattactcacaacattgtcatctccgggcttgtgaaggcaggaaatgtggacgatgctcttgatttatactacgaccttatgagtgatcgggacttctccccaactgcctgcacgtatggtccccttatcgatggcctctctaagtcaggaagactatatgaagcaaaacaactctttgaaggaatgttggactacggttgcaggccaaactgtgctatctacaacattctcattaacgggtttggaaaagcaggtgaggctgatgcagcgtgtgcattgttcaaaaggatggtaaaagaaggagtaagaccggatctcaagacttactcggttctagtagattgcctttgtatggtcggaagagttgatgaaggcttgcattacttcaaggagctgaaggaatcaggcctcaatcccgatgtagtatgttacaatctcataatcaatggacttgggaaatctcatagacttgaagaagctcttgtgcttttcaacgagatgaagaccagcagaggaatcacccctgatctctacacttacaactccttgattctaaacttgggtatcgccgggatggtggaagaagctgggaagatttacaatgagattcaaagagcaggtcttgaaccgaatgtttttacatttaacgctctgatccgcggatacagtttgtctggaaaacctgagcacgcttacgctgtgtaccagacaatggtgaccggtggttttagccccaacacaggaacatacgaacagctccccaatagagcttgacattttacgcagctaatacaagtagagctctacactaagtgaagctttatgtccatgtgaagtgtacaaaacataacgttgtgtaaatgtcttattgttttgtttatttacatgatgatatgttcttttaaggccaacaacatttttacaccaattattcctttctacattatgggagctcatgagacaaaagtctgcacacggaggaaatggtgatatactgaaatcaacgtcaggttgagatatataactgtctttcaaaatgatttacaatctgaaccaaaatactagatctagagggatcttccgtgactctgaggatgggcctagtttgatgagctcggctcatcgtggtttccttctgcctggcttgcttctggttttagttcggtctctgatggagtagggttcttgaatcgaaccaatatcatggtcatgttatcacagccttcaccacctgaagtgtttggagccagacatctatcgagaactttttcacataccaccgagagtttggtctcctgaatgttaccaatcgaaagaaggaaactgtagcatccagaaaaggatagactggaaaaaaaactgtaatccaaaggaagaaaaatcaagttagcttactgaattcaattgttcatgtatgaaatcaacgagttgttggcttgtcatgcaatccctgcagataagagatgaaccaagacaggtgtatcaatataactaccaagaaatgaacttcaaaactttttcaagctgaagtttaccaaattccatcgcaggcaagaacaaggaaatcatcatcatcacagagttcaacctgaagagaaaacagaaaattgttacaaaagatgtttcaggaaaaagagaagtggtgtcgttagaccactcacagtgttaacatctggactagcggtaactatttgcttttcagatggcaaaaacttattctgcttgaattccatgtcacctgtcaagaaacaatgagtagctccaatcagagattgcatgtaaacaactatacaagttgcattgtttaaagaagaggttaccgatagctcgtgatagatttaagcttccattgactcgccctgcatgtataaagccaccagctttcaatatcctttctttctcagcttcaagatctggtttgtgatctctagaaagattataagcctgtagacaaaggacacacgttttgacaaaaaaattaaagacgccaaaaagtcttaatcaaacacttcaaaatggtattttacctgattctttctggatatcacacaacgtgagtcacctgcatttgcaacaaatagctgcttgtctctaacaacagctacgcatgccgtgctcccagaattaggtccagcaaaatcagaatgaggaccctgttttgacaacaaaagcacaaaccttagatcaaactttactgttgcttagtgatagaagcagtaatgcaggtagggaatatttacttcctcaaacgcccaagcatcaggtttattagcactgtccccacttcttggtgaccatataagcccttcaatcatcccactgaacttattgattttgtcaccaagtactgctaactctcgccaccctctttgtccttgcatcatctcatccattctacaatagccacaacgacaagacttcaatgcagaacttcaaacaaaaatagactctttttgctgtaaacttacctgaaaaatgctttttgaagagaagtccctacgtctccagctgcatacgcctcatcactaagaacctgctggtgtagatacttggcacagaacttagaaacaactttacctacaatagtagccaaaatcatttgagattccatgtacaacaagaacatgaatcaccaaaaaggttcagctatatcagtctacaagctcttaaaccaagttttaagccggagaaaatacaccaagaagacaaatgtttccttttttacctccatgaccatcatagacacccaagaaggaagtgttatcatcgagatcaagtattgcagcatgctaccaaagttataaaaaaaaaacattctttgaatcagtaaggaaacaaaatctgacaaaaagaagaaaggtttaaactttttgatgataatcactcacagcatcttccatggacgcacgccaaccttgcatagaggataaaccatatctgagtttatgattttcgccatcttctgagaacttgtctgtttttggagtacttagatatatacccatctctctctgcaacgaaaaaattagacatttcttcatgaatcaaaaaaagaaactattcttgattacaaaaacaaaatcaaaagagaattttgacaatggacccctgtgatcttaatcttttagagctaattaagaaatcaatctacaaacagaaaccaaaacagagagggctgaatcgataagagttttaaacataccaagatttgaaaacgtcaaaaggaagtaggtgatgaagttgtacgagaagcttggtttcctcacatatctggctggagaaaggaaagacctttggtaggagacagttttgattagaggaagacgaagaagaagaaagttttgatttgggatcaaattcagattgtcgtagccccaaaaagaagaagaagagaaaaagtctgttttgttttgccttagaaaagcaacgaaagttcttaagattttgttcgtgttctcttacttgccagcacaacacactatttttacttaacactaatacaataatgtattacctgactctttatgatttgttttagctgtattgcaattttcaactgtattatatgtttcaaagtcttatggagtaaattgatatatcaaacacacatacatgtcttgtgtcttcattaaattctgaaaagttaaatacatagtagattgtaagactatttgtggatggatatatatatatatatatatatatatatattttcttaaagatcataatgtcaaagtttcctaaaatttcagttgtatgaacggtaacttactatttttcctccacacaagggtccaaggagacatgtgcaagtaataaatgcaacacacataggaagacacacggctaccatcttccaccatggcaacaatgcgatatttggcaagatttgacggactccatacattactctactaccaaatcaaaagtattggtctcaagtacacctaaatcactttgcaattagccagaccactgtttcacaactaaacacgtcttcacccaaaaaatcggtctacaaacttgggacaggtaaactttagtaaaacattcatgaaaatagtgagtatacttggatccatatctcaggtctaatccaaacactctttgtgagtctatgacaagggtatatataacctcattttggagtccctaatagcataatctccttccagattgattcatccacctctttttagacgtgatgatttactccgtgttatcgtattatcaatcatttagattactactaccaaagagggctcgagaaataatatcgtatagttgcaactttgttgcatgataagctttgactagtcttcatcaaatccatagcttttgcaccgctcagcttttccgtacagcatttttgtcaaatgccatttttacttcttttcaaaattagtgaatataatatggaaaacgtgttctccctgtgacctatggaccttttatgggtgtaatatttgtggatatggaatttaaaatttcttaatgaagctgctatttagcgttaatttttaagtagctctcccttttccttagaacgtgtaacacttttgtatatgtagataatagtagaacgaaaaaaaactctttgtagagagattctgcttctatatggctttctcttacgcatcattctctacacccttcaatggtttcgctgcaaatccgtctccgattacttccgcttttctcggcccatcattgagattctccaccagaacatcaaaaactcggaatccgagtaatggggtttcagtgaaatcgtcaaatagtcataggtttctagtcaaatctaaaaatttcagtgtctatgcaagggctgcagcagagaagtctgttcacgatttcactgtaaaggtatgtttcttttaatttatctgaagaagaaaattaggtttttgtttcttcgttatcgaaattgaagaatttgttctgtcgtcaaaatatgatttttctcaacctcactgaattatgtagtacatgtgagagcttcctaattaaaacctagactttggagacataattgtgtttttttgaaacaggacatcgatggtaatgatgtttctctggacaaattcaaaggaaaacctttgttgatcgttaacgttgcgtcaagatggtgattgtttttattgtttcttcgaattctttctatttgataagtttttgcatctgaatttttttttaagtttattttttaacttcacggtgtcagtggtttgacatcatcaaattactcagagctttctcaactgtacgaaaaatacaagaaccaaggtgtgcttgttatagtaagctttttacacatctaaatttaattaaggtaacacagtgattgtgagattcttatttattgtgtctctctcgtttttaggatttgagattcttgctttcccttgcaatcaatttggaggtcaagaacccggttcaaaccctgagatcaagcaatttgcttgcacccggttcaaagcagagttccctatattcgacaaggtatatagaaaaaaagaactctcgtttttttgagtttagggagatatcttttaattagttttgataagttatgttcttcaggttgatgtgaatggaccaagcacagctccaatctacaagttcttgaaatccaatgctggtggtttccttggtgatatcatcaaatggaactttgagaaattcttggttgataaaaagggcaaagttgtcgagagataccctcccacaacttctcctttccaaatcgaggtaccaaattcaaaactctaattcaatctggataactggatccatggttcatgtcgtgaaccaaaccaccagttgaacttttctaatgtaaatagagaatctatcaattttacgttttaacattcctaacatatgtaaaatatggatttaaatttgataccaaataagtttactaacattatttttccatgtgacacggcggaatgttgagtggtcctataatttaatactaacaatatgtttgtttggcagaaggacatccagaagttgcttgcggcttaaatttagtgttggcatatgtggtacacaaatttccaggttattgttggtataccagaattctttctgtaacgtaaataaaattatacaatcgcatgatttgttcaataaccattccatataaacatcaagcagtgcctttaggcttattcataaacatccaattattagaatatttacaacacacacaaacatattcaattcgtggataaatttaaaatgagagtgcttaattataagactaacgttggcgtcgagaagaagaagactgtttccttgactgtgggagaaatctatggcggagataaatcggtctagatacttgtgatgatctacgagatactcgaggaggaggatctcgtatctttcgagtcttaataagaggtgtccgtggctcttcacaaacttctccgagaagaagatcttcggggtcgaggaaaactgagtatacgggccagtcgaaggaattttcgatcggttcaaagaccggccagacgaaggaattaaaggcagttgcgagctcccgtctcctgttaagcaaatcttcgtcaaaatccaatatcaggcgtcgataactcactgctgtgtcgatggtcgatgtctctatgagtttgtatttctctaacctgcaggcaagactctcgctcgtctcctccatgtcttctttcagatatcaatctgcaaaagttctttgtaagactttatatacactattaaggtctttattattgttttaaagaataaattattgtattttaccttcataattgtcaccattatctcaagatttaaaaattacaaagactcgtcaatgaaattactcggaacaagttaagctaatttttttgttaaaatgtgttggcaaaccaaaaactagaactttcacagaacagcgcaacattacacccgaattcaaaggattattatagacaacttgcgattttttccccctaatttgctagtattaaacaagtgcaaccactataatatgtccctaatgatatctggttaatttatttaaatggtaaattgtctaacacgttccgtgatatgtctcagccctaaaccggctcttgtttctacggcccctgttgtcggcgacagcaataaagtggataaaacggttagtacggctgaccaatggttagtacgactgaccagtggtttctcaattaccggttgagtcaattattggctcttataggttttctcataaatgggctactttcaaaattaaatttgggcttgatttctggatttttaaatttcaataaaatatcttttaaacttcagagaataacatcattaacttgattactgggaaaaaaaaatataaaaggtattcttctgaactagtcaactaaagccgggaaattaaacaatgctttggattatccatctgtataggtctctaacagatgtataatattattgacaaggcaaaggtttgtaaacgaggagaagatattttctatatggataagttttgaaggatcaattaaatatgtaaatgacatgttttgacttcttagttttattatcctccacttgattgataaagacttctttgactttgtatttttgaaatggccaattgctaggaaaaaaggctagttgtataccaaagagagacaattactaggatttgtttccctgaacataacatttctaactttgtattgaactattggtactacgtcaattccttaaatcttggataattcttgattcaagtttcaattccaagttgtcataataaatctgcagtggacttgcagaacactctaaactacaacaataacatatatgtgcaacatgacgaaatcaattaaatagatcaaagcacatcaactcttaatcagtaccacagaatattacaaataggttacgcaaaagccctgcagtattcatctctttttgactttgcatgaccaatttgaaaggggtggctaccaaaatatcgatatagataatccaaacctgaaatagaatgaataaatatatatcagagaggtgatcaatagcaaaagcctgcacagaacatgaaaagccttccgatcaagacacaactagacttatgcaattttatgatatggaaaccaaccaagttataaatgcatttaaatgcggaaaatatctaatacctttgacaaacttagagcctctttgatctgtcttcctagctcaccaaaaatgctctatgtcattctaaaacaaaaccttagtgacatcttaatcacagcaataatgtgatgcaagctaagtatacatatgagctctgcaaaccatatatattccatttcaaatgatggcttagtatcatgagacatttccatcagactaactttagaataacgagagaacttgtaacttacatatcgttcttttagacatggcgtttgaggattatcgatgaatgattaatgctaactcatttcacaagcatcaagaaaacactatactatttctcttgaagaaattaaaaaccaattgttgtcaattattgcaagaacaaaagtttgcatctcatctggcttcttttcgtcggtttgtaaacaatgaaaaacatgggaacaatacaatagcaagaaacaaatcagtagcaagaacaacacaaacgtatgacaatagacatctagcaatacaatagacacgatgaatgttagatgtttttattgatttgtagaatatgtctcacctcttcccccagaagaaaaccccaagataacatttcatacctgcaataaatatatatgaattaaaaatgaaattttgaagtgttttggcgtagagaaaaaaagtaaatgagaaaaggtcaaattttaattttcatcacaatctagacatgaaacatacataaagcagtcaaatactggaaattccttaatcatgatactgcaaatgacaaatcgcttcctagatccaaaaattccctaccaggttcaaatcacttgaagattttggtaaaaaaacaacaaacaaatttcaaacactgtctgaaacgtcgttttgaggacctgcaaacaacatgttctcaaatcaagaaacaaaccaaaatagcatgttcttaaatcaagaaacaaacccacgagaatattctcacaagattcacaacgtgatcacatggatcaatgatatataaattagataccatctacaagtagtacaaaacacaataaactatatataatagacgaaattagaaacataattacataaatggaatcaaaacgtacgagcatgcaatataaataatctgcacaacaaacgactaatcactagcagttcaaagatcatgaacagtactttgcaagatccatgactatacacatagatatgatcgtatggagcaaataatatctacagatatttataaagagatcacgactagaaatcacgatttaaaagggctaatgagaaacgagataaaagaaaaagataaacgatttaatattaacttggatcgaggaaataaagggattcaaaagtgtttggaccagcctaagaaaactaggttaacgttaatggtcccatgttaatctcacttaaccacgccttaaactcatagattaggctttcgatactaatgatctcataaaatataaagttcaacaaaggaaaatacaaaaagcaaactcgcatgcaattgggaaccaaatcaatggcagcaaataagaacaatcttcatacagatattatcagatcgtatttaatttacctttgagagatgaagaacacatgagagagaaagtgagagatgggaacacaattagaagaagaaaacgtgaccgggaccgaatcggagccggaatctgacagatagagcagtgagcacgcaagagaagcaaatgcatcgaacatgcaaagtgcctttgtgtgctcactctcttctgtcagtttctatgcgtttctcttaaaatttgtcccaaaactccctcatcagtcatcactcattatcacctttaccttaccgacacaaattctgagattagagatcgaacagaagaaagaagattggaaaggaggcagactttgaaggtgttggagttagatctgaggcttttaggttaaacaagcaaaaccggagagaatatttataaccgaaggagaagaggaaagttgtccttcattttcagatatgcttttggaaaacaaatctagggttttgaccaaatcgtaacgaaaaataaatatattaccaaaaaagaaagaactaaaggcagagaaatattcggggaggaggattagattaataagaggagaggagaagagaggaagaatctgttaaagaaggaaacaaaaaaccttatctctctctgtctctcactctcttcaagaagagtcttatctctgttttttttttttttggcttttgtctgtttcttatctctctccctcttacatgcaatgggacagatgtctgaagagagagacatttgaatggaacggattggattcaacagtaccattgcagattatagtggtcaatctcataacctataaacggcaacgacaagcctagaaaatgatctagaattttgagaaatgaattttggtctttcacgatgggagtggtaaaatattattttttgggaatcagctcttttaatattataataattttaaaatacaaatacaataaatctttatcaaagacttctactacagcaaacaaacacaaattaaccgaacaaataaaattgaccaaattgtaactatttggtgtttaactctttctaattgatttactaaaaccatgatagttttaaaagttaccaattgatcatataacatgttgatgccacctataggtcatcttctaatctttgtaaaaagatcacacatttctttggaaatattatttcataggttttccatcttttgtgattttaccaaacacatataatacaaaaatgtcaggtcgaccttttgaaattttcatataccaccaatttcacccagatactttgtcctttttgctattttcacctaaaacaatactagtttaaataaacgtgtatacaggttttaaactttctatatatatgtgaaaatagctgtaagagaagtaataattaatagtaagagaagtaaagagaagtaaggtctaggtgaaactaacacagatatattaaagttttgagggaggaatacatattggaacctcaaatatcaattgtaacttaatctttaaaattatttcacaattttaagaattaattcaattggacacgtgttaacgagtaagaaaccaggtaaacaatccaatttccggttgctaatttcatatctttctgagatgccgaaacgtttttaattggtgcaaaatgctgagaataagctgaatatttatagaatatattaaatatattagtatcgtttatcatccacccataaaacaaagatttttaaaaatgaaataataccatgcataaagaaaagatagatcccccaaaacatatgcactcgtcacaacaagaatttgttctaagaaaatggttagagaatccttatgctgatcttgtaacaccaccactaatgtggaacttcctcatgtgtaatccattcagggcactgctttttaataacatttccagtgcactattttcgaaaacaaaattgctatgtaaatatatatatatatttttatttatttatttttattattaaaaaatcgtcaagtatgatgcgttgtcgtttattttcactttttgtgatcaactactaaatatttcgtggcaaaagattaggacatagataaaaagataaaaaaaatcaaaaaaattacgagttagatttcataatatcgattttctttgcaataatttaacatatccaaccagaaaaataaatgaaataatacaattaacacatatattaaaaagtgttaaaaaaggttttttaatgtgtttgtatatcatgcactgtgtgtgtgatgatgttaaagaaattgcgaagggaaaaacataattttagaaatcgcgtgaaggctgaaaaggtcaagaacttttgtgtgtttgttgacctaagactgtccagattcattacttcccgatgacagagaaaaacataactccgactctttgcatagtctaagatatcacatgtatataattatgaaaagatgtttccttttggatttgttaagtagaagtggcatgtactatctctatctatctatcctaatagttaatttatgacaaatatgactctaaaaatctagaaaacagttttgacggtcgcttatttaatttaattttaaaacaacattttgataattagacaaccatgaacattttatagttgacaagcacattcgaaatataaatttttgaagtaaatattacaagatattatgatcgctttttttatatgttttaaaaattaaactatattgcatgtcaaatttagattatgattataatatctatcaaaacatcaaatgtctggttatcttcataaccgaaaaaacgaagcagatcatctatattaaaaaaaaaaaaaaagatagttgctcggagtctagtagtctaccttaatacaaatcaaaagagttcttaaaatatatttatgttggataaaaccagttcacagaacgcaaaaaatcatttttctaattaggtttttaataaacgaatcgtgtgtttacattttacccatatttcatctgggcctatgaaaagtgagaaatgagagagagtatgggatcatggaccacatgttatcccattcaccaatgtattacatctatttttttatacgcataacaataatgtttcttttccgtttgttaatgtctctagatcttgttttaattaaacatctcttactattagtttgttactttttcttttcctgaaaaaatgaaagaaataatgtataacttgcaactttatgcgcaaaaaaatactataaaaccccatctaagacctcagatctactggcctaaggtccttcattgcaaggcttgttgataaattaaaagttttaaatcctacgtatggctaatgtaaatggaatattccttaaatatgggaagcaaacattgggtatccttttaggaatctccgagcatttcgtaaaccacacatatattcgtaagaaaagtctttgtttcatctagaaacaaatcatagtattaaattacaaagataagataggaaaatctctgagtatacaagactacacaactcccagtcacaacgagtttcactttgccccatattttaaagtttttggtacagtaacattttcaaaaaatagcaatttttttgaagttactagagaacctgccgatttacccagtactggtggatatacatacacattagaaagcattcaaactattttcttgtctaatgttcccaaaccagggttacgaatagcagcacaaatccataactcaacataaacactcgagtcaaattcaaatgatgatttaggaagataacaggctaataatcgtcggaatgtgtttcccttttctttttttttctgcccaaattttctctgcaacactccaaagagagggagagatagatgacagaaaaacgtgggtcaaaaaataaaatgaaatgaaaataaccaaagcaacctccttatgtatccaccttaacacaaactacatctgaaatcaaaacctaagtaaataaaaaagcatcactactagacgtttgtctttaaaacaattctacacttctactgctcaagacgatgttcaatttcacggccaccattacccaccacacgcttatcgctttccaccttaaattacataaaccatcataattcaaaagagaaaagagcacaagcccagacactcatcgcttcctcttcttaccggactttgattgactcccctgtgacttgcctgatttcgctttagttgctggttctggctccttgggtgtctcttcagattctgactcggaagcgctctctttggccttcgaagcaggtgtagacgcagaaccagattttgctttaccctttcctgtcttgcttttggcaggtacagatttcacaggtcccgacttggattttgaagaagttgttgccttggagggctcttcctttttcttggatgaagctttagatttcccagatttcgatacgctgcttatatctttcttcgacctgctgcttcctgatttaccaacggttttggggggttcctcttcctcgctctcctcctcagagctcgcctcctcttctctgctagcttcctttgaatccttcgatttgctcgctgttttgtcatcctgggacgtcttgctggacttggaagcaggagtagctttagccttgcttgatccagctccactacccctgaatacatcagaagtacaatattacgtattagtagagaattattttagagacttcaacacttgttaactatttgctttcagtttcaattactttttagctgatgagttgtccatctttgattgcttgcctgtcttagctttcttcgtcaggggcctgcatgacaaaatgctaagcttggtcatcacaagtaaaaagatgacatctagctattccttccagtgccacataaacaacggaactaaagaagtaacacgtacactgtagaggcatcttcctcttgacccgtctgatcagcagcttcttcatcctgatgacagaaagtgtaagttacaaaataggcgaagagcaaaaaaagccagagatggatgaaatataatgccccacctgtgacaattctgattcatccagaggactccacttctgattcttgagatacaagatttcttgatctccatcatcatagataacctgcaaacgaacatggcaacagcatacaacaattaaaataccataaaaaggcctgaaacaaagatgtatagcttaggagaacattcaaaaggctactggttgaccacaaacaaatcaggcgaaccaaaataggggagacggataaaattgggcttaccagatgtttcttctttgcagcatcatatgactcgaccacacctttatagtacctgcggtaaaaaacagattactcatttgaaagcatagaaaacaaaaaattacaataacaggtagtccagattctgctgtctaaaggaacaaacatagaagtccagaacagagaaaatgcaaattgccttcttgtaaatcaaatataattcctaagaagaaaatacaaaatgcttacgcttgatccataggccaccagactttgatcctcgatccaactaaactttcaccagatgcctgcccaagaattgattcggtatgaaaaagtatacaaaaagaaaaactcgtacagagcaaaggaaaccagtacaattaaaggataatcgtttcagagaatatttcttcaacttgaagagaataagaagctgctcccatgcacaattactactgcaaatggcaattggtgaagtgaagaaaacataccttcccttggcctaaacttcgttttctctttgtgtttgaattaggactttcttctaccgtttgcttcgcttctttctttgattttgaggctagctttccggaggaaacagctggctgaaaataaaattaaaccatatcggtaagaggacaaggacagggaagtcagatatgtattcgaatcaattcaggtcagggaactactcactttttcattatcaccagatgaagtgtgtaatgactcctcatcaatggctttcccacgtcctggttttttcttttcctcttttggctttgtggattcttgtgcattatcactcccaactacctttttctctgactgcttggctacttttgtctcagaggtgcttttctttgaaggaggaacagtaggctttgttttacttgacgaagcaaccttctttccagacttttttgtcacctgaggttcagacgtgtttggttcttcagaaacttcttcggtagcaatagaagcagaaggtttgacctcctctgtcgagctctcctttttcttctggtttgcagtcttcttagggacgctttgctcaggaagttcctcagccattgacggagaactgacattggcagtttcatctcctgatgtcttagatggtaaaatctgcacacttttattcttttcattttcagaagaggtggctgcggtaacagatgaatcaacaggaggcgaagttaacacatccttgctgtccaggagttctgcaggttcagtctcttctttgatatctgaatcttttgataaatccgcctgtttgacagaactagattcgttttccttttcctcaatttgatgttcaacatcaggcttctcttcagtagtattattcaagtcagtgtttctaggattatcaagttgctgcggctcatctttggcacccgtatcgtcttgcttcttcatggaatcagtatcaaccgaagaatcattctgttgcgcgacaccattgctaactccagacttaccagattcatccttaggtgcatcagttcgctcaggggtagaaatttctgctgccttctgtttatcatgttttaattggaacataaaaatcaattaacaatctacaaaagctaaaagaagaaaggcatctatccttttcatacaaatcaacaatgactatcgtacctctacttccgtttccctttttatatgaccttgactatcctggagaggaaaaatatggaagaacagtataagagctaatgtaactgaagacctgcataatcactaaaaaagttgaggcagtgcggcagtaaaaaaggtgagaaataaaggcttacttctttttcatttgcaacaacttggtcttgctgcaaagcactgaatgtcccttcacatatcgaagccactatgttactatacttatctagagggacacccgacgatttcactgcttcggtcagataagttttgagcttgctagcacagttactgagaacttgttctgccaacctccgtgatacttgggaaatctgttgataagttaaaagatttaacaaaagagcattggttggtgatagaaaatcagtagaccatccatgtattacctcatcatcctttttaacagaatgtaggattggtgaaagcatctctgaaggtatatcctcgctttcttctaaaacaagggtcattatgttctccatagatgaaaatacattccctgaatgatggtccctgaaagggtaaacaagttcaacatcagacaaacatacttattggatgttgtacaagcaaacataagcaacaagcaatagactagttgtgaactatattgcgagtacataaagtaaagtagcatagtccatggataggtagaacgacatgaatgaaatgatatcaaatgagaacaacaacatccattaatcaaacatgacacaaggaaataaaggaacaacagggaaataaacaagtagacaattccatgtatgtgtatttcctggacattacattacaagatgaaaaaacaatgagtttaattctagcataatggatatattagagtgtaccttatagccttgaggaaatgctggaacatctcaataagaagtgcatcacactcaagatccaacatcacaacacatgacctgaccttagccacagtttcaaggatagatatccttttagcataggaacgactagatttgtcaaccagatcttcaaatgatgatacaatcaacttgaatacttcctgcacatgaatagaagaaaagagtcagtaaccaaccagcataatgtccactccctcaagaaaaaaataacaaacaactacataccttcatctggtcatcatcataaggagcatcaggagcagttattcttgtaatctcactgatgcaggcagcgacagcaactttgacatcgacatctgaatgcttgaagagttttccaccgactaatcctttcatcaatggagtgagtgcattctgcattgagtcgggaggtgactgttcaacctccgccagggatacgaaaagtttctgcagaaataaagcacaaggatcatcaatcaaactcactaactccaaaaccacagggatttttatcccaaaccgagaaacaaccgtaactaagatctaaaatgcaggaataaaagcatttgagtagattcagagagtaaaagagacgaaggaaacagagcattaaatccagaaatcgagagtaaacacatgcacagacttagcattgccacgaatccgaagaagaagaccaaaataaaagagaaagaaacaaaagggggtggtgaaggagatgagagctcacgtcaaggaaagagagaagctcatcgagtgaagaaggcgggtcaataagcttttccccagcttcaataatctgattctcgagctctttatcagaatccgacatgactccttctcctagttttctgactcgtttcgctcttgcgtatctacaattgaatagatctcctctacaaaccctagattcgaaaacagagaattctcagcaccaaaaacctaaagcttccattgaattccacaaatggaaagagatgagaagacggatttagcgaagaaactacgagaaattttccccccaaagtcactgaacaacacgctagggttttttttcttctctccgctctctcttttttttttttttgttcgctctctctcaatcttaacagtttacagaaaactaaagaaaaaaaaaagtaaagaaaaataggagagtcctcaagcgccgttaaaaagatatatatataatctttaaataaaaaaatgggatgtatttaatatttggtgtacggcaatttattagttggtcgtctatttgacgagatgtgtttcttcatttatttttatttctctttctcttttatggaatttttttatagaaaaatggaatacaaaaatcaaggaaatccagtattgcgattttttccctttatttcggattttactttagattataaactcaggttagctcattatttgctttcatatccgatttttatatattttgtgagtattatttgcttttttatcaaccagactcacatgaagcatatgaaaaataaaataaaaatgagtataaaggataaaatcctgaaaaacaaatatatgtagaaatttgtagttgacatattaaagaagaaaaataagaatttggtaagattcaattttaataagattttgtcactattaagtttatacgattctatattagattgtttttttgattctacatatgtactatttggtatattaagatgttgggaatatagacctagatagaactctaaaaagaaacatagattattaaatttatcgttaacagatccataaactataacgattcatattgcattaacatgaaatcaaatataagattcaacaactaaaaactggatgaaagaaaaaatattaagcggtttaagaaaaagaaaaaaaaaaatcatttattcctaagcatgttgtcccaaaacatagaaataagttttgaattttgtaggactaacactgtataatatagtcatcgttatcgtatgtacacatattaaagggcctccagtttattatttacctattgtctctcatgtctatagctaattaacacttggttagtagaattactcaaacctcaagcgtgcagcccaatagttaggctgctcagaaaccctatatgaaacacaaacgggctaatctaacattaggcccaaatcagattcctagcatcgtcgagaagcccataagagggtttgtatgcaaatattaaacattactaaaaaatagtgataatttgctaggtagcacattttgattgctaagtacttgaaaaaaaaaaaaaaaaattactttatcgctagctacctcctctctcactcgtcgcaaaggtagtcttcacccagatagagaaaaaaaaagacgttaaaatgttgtcatcatattctaataagaccttatagaaaacccctctaagcatatattttctgtcaaaaaaaacatattactttcttataccaaattataaacaacaatgttgaaaattatagaatattataagcactggtggtagtaggtgtcggtgtatgtgaagagcaaagatgacttttcttggggaatttgcttgagttcgcattcccacggaagaagatagcgacaagtttaagcggttacagagacttatacacgtttcatatcgtaccattctctaacaatgtgaatgagatgattttgtagcatgtttacacattaaagtataagggggcaggtatatttaaccagaaaaattaaagaggatagatactagaagtataaacaatgtgatattcaaatttcaaatgtattattagaaaaggagtataagtaacactactatgccaaaactaatatgtaaaatctagattaatcgagcatggcaaaactaactattatagaaatgaaacggcaatagataagataagtatgttgtcgatatccagagacagctagtgcagcttttagtagccgaagaagagtgttctccataacagtagatcatatcaaaacttaaataaagtagactgtctttaatgaaagcactcacactcccacatgcctctcccacctttcaattatgttgttaattattttagacgtgtactatttcaaatttggaccatccttaaaatcttgtagggtttttacaaagtacacatcgaatataagcattactcttttaacaaaagagaaaaatataaacttactcaagttttttaaggatgagtactcactcataagccaaaaaaaaggtggaaagatacagtattaatttaaccatataataatagtaaaaaagctgataaaattggtaaaagtaaaagctaacaaactctataactttataacaatacttttcacgctaagcctagtagaccaatttggcttttttacttttaacaaaaccaccaaccaaaccaaaaaaaaagttaactcaaacacaacgacacatcgtaccttgagtactatgcattatattagattgtgtctgagcacatttgtcgcatacctcagaagctgatgagatctggcgaagcaacaacactcttctttgtttttatttcctcttgttaaatcagctcatatgtgtctttctctctattatttttgtagaaatgcttcatgaatcatgatgacacctacaagacgtgatgcttgattattctataatgaatttgtgtaaaattttcgctacaaaacaaaacaataacaaacaaaatgtagttagatcgacagatccaatttactccacgccgccacattgtttattcaggcatgtactctattttatattcgagaaacaaccataaaataatctctcaaaagattccaaaactctgtttgaaaatgtattttacagagacataaatataaaattaaatacaaacaataaaagcaaaagcaagagtggaccaagccatacttcaaagtgagataatgaccgacactttagttaaggaagatgggcaatatggtaatttcaagattcaggctatgtgggtggggtctcgaggaagactaaaaaactggtgaagtgcatgtgagagactaactcaatgccctctaatattacccgaatttacattttatgccactgtcagtgagtgagagacagagcatcaaatcaataaagccttgggaagaaagttaacaaacttatcaatgtgacaatctacttaaattagcaatctgactaatgattaagacttacatttttcaaaagggaaggctctttgaagtggagctcaaacttagtgacttgaaatgctctgaaggaacaaagtcttgtggcaaattagctctcttcacaattctcttcatattactctgtaaactctgttgcactaactgtttcacggctttcctctcttcgctcatcatcaaatcgttttcctcgtggtccaaaccgttgtctctggtcccgtatatcggtgcggataaggctccgcatgatcctgtactatccaggacttgctttcctttgtctactctaagacactctaatatccttgatgctctcttttgtgccagtgcacttcctaaaagagttaactcgagcaacgctgattcgattcccgcctcaatcatcacttgtctatctccgtatcccttgtgagccatcaacattagaatgtaagtcgccttttcttggcaccccggtgagtcagtccagttcagtacatcgactaaaaccgggaatgcgtcgcacaccaaaccgattgcttttcttccttcagggactgccactaaattgctcaagatagcgagaatcctctcactcacttccatatctcccaatgtgttcaaaagatacgtgatcaaatcggtttcaaggataaacgaaacgtttggttgatagattgagaggttgtagagagctctcaatgcgtcctctctcgcttgtgagctacttgtttcatccaaattctgaagagttttcaccaggaagattatagctccagaagaaccaataatcggtttgtttgaatctaaagcgcttaatccaagaaaattagcgaccacagcttctgcaatctcttgatcaggagtgtttggagactcaattagcttcagcattttgtgaacagcacctgctttaacaatcgctgctttgttcctgcaaaacagaatcaaggaaagtcctaaaatgggtaaaatattgaaataaatgcttcaagttatacacattgttccatacttcatactcactctagcagaaaaaaaaaaagacatggaaagtgacttaacgaatgaacccaaaacaaacacagaaactatttggccgaaataaaaattcatggcaatgaaagtgagacttacgcgtcattaccaatcccaagattgagcagagcataaagcgaagcgatctgagcatctacgattctcgagtcatcgatcatactaactaacggcggaatcgcaccgagcatcgccaacgtcactctcgcctccgagtcttccttcgccaacaaccgtacctcactcgccgccgttattttcttccgacagtctcctccgtcatcgttatcttcacgcgccgccgcagctgattgtaactctctgaccacgcgcttcaaaacctcaagagcttcctctttcttcatcgtctcaacatcagcttcaacttcagctagattcaacagatcacaaagcttctccgatttcttcgatgtctcctcgaacgctacgccgttcaacgccgcgccgatcgtattagctttcgcatctttcgatgatgcaactgttgacttcgccgtcaccgtcacgtaacttccttcatcgtcctcttcccggagctcgtgacggtaacgtgagctaccgccgcaactaacggcgtcgacgatctttctacggaatgtggatctagagaaggtgctccagagacggaaatggtagccggaagtagaagaagaagaagtggaaggagcacggtcaagaatgagagatccgatattattccggtgacatttagccatggttgtgattctccgatcagttctttaagcttaacctacttactacatatgcaccaccaacaagcaaagagagagtgcgaaagatttatatatatctttttatttttttgtaagaaagaattataattatttgtttgtttatttggaagcgaaaacagagcgaatgttgactgttgattacttctttttataaagaacaaaaatttgcagtacttattgatttatcaaagaataaaaaaaaaactgtgtttggatgcagtcttataataaatcgcggataagctattctatcaattattttaagtcaattctatatgcttttttcttcattgatgattttttaaattgataacgtttatgaaaattgtttttttttctttgaagagaaaatgtgaaagtacaagagaggggtgagtgaggccatcactaatttcaaccgttcaaaatttacaaaatgtgtgtcagggaagcttctacagttctacacaagtcccatcattttgatgatactaaatcagtagattgctactactattggggctttgtttatgattctttttctataacacacaatatatttcattttaagaaaaaagaatttctagaagaagtttatagctctaaaaatggtccaacaaaaccaccgagaaaccaaaatttaaatcaatgtttaggctcttctacaattgatttcagtaattttctaaagagtaagaacccctttggatacgtttctgtattatttatttttcgtaaggtttggttattttaggatggctctacaaaaaaaatacaataaacatctaaaataacttgtatcaattaaaaataaatatatgcaaatttcatgctgcacagtggacatccagtggaagtattcgagaatgatttaactgtgttgtgttgtttggtcagatcgctgctaattgctattctcaagtctcaaccttcttttactggtacgcactcaaagcccattatcaccgaaaacatttcggtggatattttaataattctctaattgataagcgtgattttatgtcaacttacaaggcttttcaaagcccaaaaagggccacaggcccaagcataaagagaaacattcacaccatatctattttaaagattaataaaaatgaacaaaactgattttaattgtaaaataacaaaaatttgctttcattgagagttgaactcaagacctcccgcttactaaacgggtgctctaaccaactgagctatgaaagcttttgctgttacaattaattaaaatctatataatactttgtaacaaaactttttttaagtgttagttaatttaaaaagcgttaatcaattgaaatgtggacctcttaaaaaaactaacaaatacaaaaatgcaccatttgtccatagagtattggaaactaagtaaaccatcttcatactattggtcacaaccaaatccctttccaatttgtaacggacgactaattttggttttgtggtcaagactcaagataatgctaatttttaaacaaaattacagtgcatgaatctaatctttatttccttcttcttttataacctttttcatacttaccatttgcatgcctctctttaatatttgttttattctatagaaacaaatcacattatattgcattgaatagatttttatttaagtttcatttatttgttttcagacacatatctttagatactaaagatataactaaatatttaaatcttatttctggtcaacccattcagacaaagaatcttaaataaaaaaaactttaaattaatttcttccctaaatatgatatatattttttaattatgttacataaatgtatatatacaatataaatttatagtttttttttggtaagcatataaatttatagtttgaccagtgtcaaggaaacttaataaatcaaacaactttttatactaataaaataaaataactttttgttttaatgatatttaaatatttaattattcaatatatggttattttgataattttattttaaatcatcatcgaatttcttgttgaaatttcaaaattgccgcgtaatcttaacggttttaggtacaatttcattcacaaaaaccactaggactcacttctaaaaatttctcacagccacaactacatctgcatccccttctggttacaaattaattcacctttacattgaaattgacaaaaaaaggtagtgttatctccataaaacaaaattaaaaggaaataaagaataatgaccactccctctctatatatataaacagacgtttatcatatccttaagaatcacccctcttgcgttttagctcccttgcattttcttcatcttgtacgctcctccttggtcttagattttctgagatatttctcttttcactctttcttgttacgattttatctaaaaatttaatgaatcatatttactgaccaaacacattgttgtggttttttcatgcagagaaatggctaatctgttgcaaaggcttcgtagacgaaccgggccaaagccagattatattgaagacaagttggatgaatacattcgtgaagaacaagttgaagaaacaggcggaagtaaccaggtatgtctttgtcttgttgtgaaattatagatctgcagtgacttttaattatttgatccatttcaggattgtcctcttggcgagattgaaaagattttggaccgtgaatggcgtcctactgcatctaacaatccgaattcttctgacaacgggacaccaaccctagttgtcgtgaaacaatatcttgtgaagtggaaggggttatcgtacttgcactgctcttggtaaattcccagcaatatgcgatatcgtgttgtatttaattaaacatgtcgattattatgtttttgttgcttctcttgtctggttatcttatcatcacttgattattaatgtcaattcttagggtgcccgagcaggagttcgagaaggcttacaagtcccatcctcatttaaaactaaaattaagggtgaccaggtttaacgctgctatggacgtattcatcgctgagaacggagctcatgagtttatcgccattcgtcctgaatggaaaactgttgaccggattattgcttgccggttaagtgattcaagtcttgtcctttgtttttatgtccttaacttgatagacctcgttgtgacaattatgtttttttttttttttttttcctttgtgattatttattcatgcgtttatatttctttctctatcttctgtgtagaaaagtgtgacacttaatggatttcgttttgacaattatggtttttttgtttgtgatatgatgtagggaaggagatgatggggaggagtatctggtgaagtacaaagaactttcttacagaaatagttactgggaatctgaatctgacatctcagatttccagaatgaaatccaaaggtttaaggatataaactctagctctcgtagagataaatatgtcgaaaatgagagaaatcgagaggaattcaaacagtttgatcttactcctgaatttcttacaggtattttattagactacttgaacaatttgtatacagtttctgtataatgttattgatttacttaccttatatgtttttaaggcacattgcatacataccagctcgaagggctgaatttcctaaggtattcatggtccaagaaaaccaatgtaatccttgcggatgaaatgggactaggtacgtcttcaaaaatccatttcttttttggggttattcataggctttgcttttatcatttgtgtaaaataagattggttttgtggttgctgcaggcaaaactattcagagcattgccttcttggcctctttgttcgaggaaaacttatctcctcatctagttgttgctcctctctcaaccatccgtaactgggagagggaatttgccacctgggcaccacatatgaatgtggtatgtatcatgtttcgtatatatatgtcacatatacggtattagttatttattaatgttttcatcgtatgatatatgcaggttatgtacactggggattcggaagcacgtgatgttatatgggaacatgagttctacttctctgaagggcgtaaaagtaagtttgatgtcttgctcacgacgtatgagatggttcacccagggatatcagttctgagtccaatcaagtggacgtgcatggtatttctgtattaattatctgaatgatactatatactttgtatgtctttcttttagatctcatattttgcttagaatatcattctcttggttagattattgatgaaggccatcggttgaaaaatcagaagtcaaagctgtactcttcattgagtcagtttacaagtaagcatatcgttctgttgaccggaacaccacttcaggttcgtcgttagtcgatttttggttcttcgactttcccaaggttcattcaatcctacattaaagtttacctaattagttatgatctctgaaatagtactataattattatggtatcaattcttttgtatcactaatacttatttggtgttttttcagaacaacttgaatgaacttttcgctctgatgcattttcttgatgcggacaaggttagccaaaagataacgcatataaaataagtttagtttattctctaaaatagtcattataagcatacaagcttgctttaattattttattttccatgcttgcagtttgggagtttggagaagtttcaagatataaataaagaggagcagatttcaagactccaccaaatgttggctccgcatctgctcagaagtattaaccaacaaatcttattaagaacatttcgtttgaagtctcgcaccaagggataactataaccatggtgattaatcttgcttttattgttattgcagggttaaagaaagacgtgctcaaggataaggtgcccccaaagaaggagctcattttgcgtgttgatatgagcagccagcaaaaagaagtgtacaaagctgttattaccaataattatcaagtcttgacaaagaaacgagatgctaaagtaagttttgtggatctcttgtgcttatgcagatgtatatatattgtcttggtttaggaaccttttagactgtacttggtaggataattcggctggttaaactgtttcagatatctaacgtgctaatgaaattacgccaagtttgctctcatccgtatctgttaccagactttgagccaagatttgaagacgcaaatgaagcttttacgtaacatttgatcactaatcttgacgtattgattcctttttagtattttgtgctgacttttgcttgaccttttctgaattgttctaaagaaaactattggaagcttccggaaagttgcaactgttagacaaaatgatggtcaaactcaaagagcaggggcacagagtgctaatctatacccaattccaacacaccctttaccttttggaagactacttcactttcaaggtaacctaatctgctatatctgtttgtcgacctattgatttgttcagttggtgttgtcgctctgcaaatgacttgcgatataatcttttccttccacttaaaagttactttttaatatatcttgagacgcaaggaacagtaactttctttttataatttgcttatatgcaattaaggaaaaactattgtatgatattgagccgtaacaaatttatttttattttgtcagaattggaattatgaacggattgatggaaagatcagtggacctgagaggcaagtaagaatagatcggtttaatgcagaaaactcgaaccggttctgttttttgctcagtacaagagctggtggaatagggataaaccttgcaacagctgatacagtcatcatttatgacaggtttgagttccaatatctgtttaatgaaatgataaagtgcttgttggaagtttctttccagaataacagagtgtttggatcttctaagttaatagcggaaagatattgtagaggcatttaagatggttgtgatgaatttattgacatgattttttcactggtgttgtagtgattggaatcctcatgctgatctccaggctatggctagagttcatcggcttggccaaacaaataaggttctcttttcatggcgtcaatgtggaatcatccacttgctatttcattctttttctagctatgtcactgattaagcctatattttcttatttaggtaatgatctacagactgattcacaaaggtactgtagaagaacggatgatggagataaccaagaacaagatgcttctagagcatctcgtcgtgggaaaacaacatctttgtcaggtatatatatatatatgtattccttgttcgatttgttattgattcttattgctacaaggtttaattaattactgttttctatccctgactgtaattaggacgagttagatgacatcatcaaatatggttccaaggaacttttctctgaagagaatgatgaagcagggaggtctggaaaaatccattacgatgatgctgctatcgaacagtaatatattcttctttctttctttgtttttactttcctagtgattttactttaatagttcaaagccaccatacaattgcatggaatgttcatgatttgtagccacaccttttcttctgcaggttgctagatcgtaatcatgtagatgctgtggaggtctcactggatgatgaggaggaaactgattttttaaagaatttcaaggtttacttctttctctttctctttctagatgagtggttattgatcagatgatccaatatttgttaaggtccagagaattgtttagagagtaataattcaatggatatgctacaagaatcatcatgtgcatgtgcatgcatatatatacacccttttttcctgcaatattaagttatacacatatatttagtggcattaattccaaatataatttctctttttgatgttatttcctgtatattaggtggctagttttgagtatgtagatgatgaaaatgaggctgcagcattagaggaggcacaagctatagaaaacaattcttcagtaagaaatgctgatagaacaagtcactggaaagatttgctgaaagacaaatatgaagtgcaacaagctgaggagctcagtgctcttggaaagaggaagagaaacggcaagcaggtacgtatactcttcttgatcccacctctccagaatcgttttatgtcctttagcacaagtgttcttattcctgcttttgttaatattactaggtgatgtatgctgaagatgatcttgatggtttagaagaaatctctgatgaggaggacgaatattgtcttgatgatttaaaagtgacctctgatgaggaggaggaagcagatgaacccgaagcagctcgacagagaaagccgaggacggttacaaggccttacagaaaaagggctcgcggtactatacttttccaaatattgcattgaagatgacatcttgttggtttcagaggtttacaagttaagtaactttgaaaatctattttgctgtaagataattcggaggaaatacctttgatggaaggcgaagggagatatctcatggtgctgggatttaacgagactgagagggatatatttttacgtacgtttaagaggtatatcttctttctaataatgttgtctaaattgtggtttggcgtctctcaaagcatcatagtatatcataagtgtctcaaaacaacttttgtaggtatggagctggaaactttgattggaaggagtttgttaatcccttatacatgaagacctatgacgagataaataagtattgacgacttaaagccatttatgctcttattttcagctgctttacaaaaaccaacagttgttcattgacacttgttaaatttgttgtttctcaggtatggaatcttatttttgaaacacattgccgaaaaccctaccgataattctacaaattttaaaggtaatttatcactttattgattatatgtttgttggtattcttagatatatccaattgcttatttctgttatcatatttttaagttattacggcaatggtctatgcagatggagttcccaaagaagggataagcagtgacgagctactagtgagcatgacttttatgatgctagtaaaggagaaggtaagcctaccattttccagtgtctatggaatttaaacagttacttattagcactagtaaccgaaccaaaacttgagaagattcattgcattctttcttaaagtttttgcatgtggtttatatatctgaaagtttctcgtttgataaaatttggtttggtcctctcttgtttgtttgagctcacttctcaatgtttgatgtgacagtgtcaatttttggacaaccatccgacagcacctgttttctctaactacgtcatcagtaagtacaatttgagaaatggagcattttctaaggaagaacatgataggatactgattcctgctgtttccaagtaagaacccttcaacgattatccttacttgattttgtttctctttgtttgtttgctcacatgcatgttgcttccattcttgaaactttgtaaaaatataggcatggctatggtagatgggtggccatcgttgaagacgaagagatagggttccaagaggttgcctgcaaagacctgaatatccctttccctcctgatactaaatctgctcgtaaaagaatttgtgaccatgtgggaaaacgggttaagaagatggaggatgccataaagtatgagtacgcagtacgtaatattttgtgccgactcagtaattttaatcttttgtcttctcatgctactactacattgttacattgttcatctatattggtacttcgttgcaggaaaagatacttgctgaacaagcaaaagctgaaacaaagggaacaagctttgttgatgcagaaaaagaaatgcttaagaatgatcccatcagtatgtgtcttgataagtttctacagttactaatggatatatttctttagattcttgttctaactgaaacgttttaatcttgcagcttcaaaaaaaaattctgcaactgccgttgacaacaagcaaggcagagttgaaatggctcaatcatacgatcaggtaaacaaacacattcctattttcgtggatatatagttacattaagaacccatattaacttatctttctccacacattttcagagtgttaatgagaagtcaggtgagtcattccagacatatttagatattcaaccgctgaatcgaatgccgagggagagctttaagcctctggaacctatcaatgaggaaataagcactaggctaagcgttgggacagatcatgatgtagagatggatgcagcggataacatcattgtgctggattgacatcaaaaatcattattacttctttcatgattgtgttgatcgttggctgattttctttactaagataccttttgctgatttttttttttttgtttgtcaaagttaccttttgctgaattttaattactaagttaccttttgctaaatttgtttgcatacagcgtagttgtcttgagttgcagagtatcatatttgtccatttatagtttcttaggtataaagcgtatatgaaccaaaatataaccaaatatattatggaaactaattgaaactgaagttatgatcatcttgggttttttcatcggataagtattagtttaaactagattgaatctactactcttgatcaaacaagcacacacaacttgaaataactccaaacaccatgagttcatagaaaatgatttcccactaatatctttgttaatgccaaactttatcattgcatgtcttttgcattaaaaatacttcatgggtgatgatcatcttcttttaattgaaccaaagaaacgtcttttgagctctctcaaaacccaagacacacatatgcatatatttatataaactgttgatttctctaatttagatatacatggaaagaacattccctaaccatatcaattaggttggatttgatcgtatttattgttctataggatatattagtaaaattaagaaacaaaagaaatagaaatgggaaatacaaaaagagaaaaagagaggagctgcagaaaacagggaaaatggtgggaaagaagagacaaaagagaaaggctttaaatccacgcttactccaacttccaaacatatacctacttctccactcttttccactttactcttttatacctatacccatcttatattatattacatgtacaaaaatattgttttcagttaaatctgcatttattctacagttcaacgcgattactgtagaataattttaagccaacgactgtttggaactaatttttcagtttgatacgagagcaataacaaaatttcaaagaaggtttttttggggttaaatgtcaaaccaaaactcgttttagacagtaaaaaatatatacgattaaactatagtctaatacatatacaaattttactttgcatatacaatttaattcttagtaaatccaaataagaatctaaatagatgataatgatcaaaatctgtatagagatgcacatagtaacttcgtgaattctaagtattagactaaattctcatatacagcatgcagatatgtcatatgcatgcatacacatttttacgcatttcagtccgtacgtatcgtgtatatacggtaacgatggttggatatacatgtgcatgtttcaaagttatgtacaccgaagggacaagctaggctgtgatgctcctaattcaagcttccttcttacgaatgtcaacttttatttaattttctttattgtggcctggccgaataatcaaagatataataaatatttagaggcaattattgattagtgtcctttaattctccttaaattgtttggtttttggtcggttggttccgagattttattttctgtgttaaaatgttactaaccaataacggttgaccctaattataagttctccaacaagatgtgaacttatttgctaattataaacgtgaacgctaaacataaacggaagatttatttggtttgagtttggcgtctgcatttacatgtcgtagtaatataaatttacattaaaaattaatgtttctatattaaagatgtgaattatttcgttttttcatgcacataaacgcatatgtattgtgttgaaactagacgaggctataatgaagacaactgttgtttctttttatctgcaacaatagtgtatatttgaccgttaatgtaataagttcatgataaggttgggaggatagcttccccgtgatggaggtcgtagggtttgtatgattgtgtacagtcttttcatttcacctagctaaccctattgacgcattgtgcaagtgtaagacagttcatacttcgtactactcttcaattatatatatttacaccacattatcaaccaaaatatatgtatttcaatccaactgtatactagacttttcgaaactaatataagattaatgttgaattatgttttcttcacaaaattctagcattagtacatttgaggtgaaaaaacacaaaattcatcctaatgaacacataaagaaaataaaattttaaaactcttcttcgtcaccgaatatttacaaataaaatgatatgtgtgtgtgtgaacctaatttaaagcctatgccaatgagcacatataggcttttgctctctttttttttttttttttttttaattatcacaatagcataaaatatgcaaaacggaagtacctttacaatcatttgtattcgaatttaaataaaaatgataaaacaccaccaatagtaagcaaaagataattagtgttgaaactaatcatccgtaagcatatagagcacttcgatgaaaattagagtattaaataaaattaaaataaaccctcaaaactatctgaagagacacatagagtggctccttggcatatgattaagctcccttaatttatcttctcgtatatatataggcattacacatcttacttattacattcacacacacccacattttacattcaactcttatacaatatgcccatgttaatggcgacacgtatcgatataatccaaaagcttaatgtatatccaaggtttcaaaaccatgacaagaagaaactaatcactctctccaatttggaccgtcagtgtcctttactcatgtactctgtcttcttctacaagaataccacaactcgtgactttgactccgtcttctccaacctgaagctcgggctggaggagactatgtctgtgtggtatcccgcggcagggagactgggtttggacggaggtggctgcaagctcaacatccggtgtaacgatggtggcgcagtcatggtggaggcggtggcgacaggtgtcaagttgtccgagcttggtgatttgactcagtacaatgagttttatgagaatttagtttacaagccttccttggatggtgatttctctgtgatgcctcttgttgttgctcaggtaaatttattgcaaattctatacgtttcctttctcaagaattttgaataatttacgtgtaaaaatgttaggattttatgttactactagattttaacccgcggtataccgcggagataatttattttttaaagttactatatataatagtttgcaaattatatttatttataaaatatttttgttttatagtttacgattgttattaagtaacgtcctgtcaaacccgtcccgccaatccgtcccgtaaaaaaaactcactgattttatttatgatatgtttatgaatcattgtctaaatattttttaattttgtagtaattaaatgctatcaaatatctctgcggtttgatgattataatcgaattattatagtcatgtagaaaaacaatatcaaaaatgataattttgtagtaattaaatgatattaaatattttggaagttttattttaataactaatcgtgtagttaatgtggagagattttgggaagattgtcaaatatttaattcaaagattttctttctaattatcaaaaacaattattaaatgtcagtagcagccactgtaaataaatctcaactccaagatttattttacaaagtggctgcaaaaatgtatatatagatatctatatatcaatatttagttatatacgtactttgactagatgtctacaattttcatcaatacgaatggccagttaaagtaaacctatataagcacaaacattcattagcagagttataataaggaattttgagatcaaattcagattagaacgtacattctaagcaaacctttacacacaaatatctacgtccacatgaataaatatataatacttttgctgtaattaaagttttggatgggtttttaatttatgtgtatgctaagctaaagtgattattactaaaatccactaaatttatatatttaaacaaatagatatgaaacgcctgagaaacgggtagtgatttagttaatatttgatgatatatcgacgtataataaatgtaggtgacaagatttgcatgtggaggttactcaattggaatcggtacaagccactctctatttgatggaatctcagcttacgaattcattcacgcgtgggcctccaactctcacattcacaacaaatccaacagcaagattactaataaaaaggaagatgtggtcatcaaaccggttcatgatcgacgaaatctactggttaaccgggatgctgtccgagaaaccaatgctgcagccatttgtcatctgtaccagttgatcaaacaggcgatgatgacctatcaggagcaaaaccgtaacttagagttaccagactctggttttgtgatcaaaacgttcgagcttaatggcgatgcgatagaaagcatgaagaagaaatcactagaagggttcatgtgctcctcctttgagtttcttgctgctcatttgtggaaggtgaattcaagaaatttattttacaaattactgttttcacccaaaaatttaggtgtgcgttttaaaattttcaaaacatttttgatgatttaaaaaaaaaactatattaagaattttttaaaatagccattataagaaagttagaaacataaatattaagcgtataattttgcaggcaagaacaagggctttagggttgaggagagacgccatggtgtgtttacaattcgcagtggacataaggaaaagaacggagacaccgctgccagaagggttttccggcaacgcatacgtgcttgcctcggtggcatccaccgccagagaattacttgaagagctaacactcgagtcaatagtcaacaagatcagagaagccaagaaatcaattgaccaaggttacataaactcttacatggaagcactcggaggtagtaatgacggaaatctccctcctctcaaagagctaaccctaatctccgactggacaaaaatgccatttcacaatgttggctttggcaacggcggcgagccagcggattacatggccccactgtgtccaccggtgccacaagttgcttatttcatgaagaaccctaaagatgccaaaggtgttcttgtgaggattggcttggacccacgagatgttaatggcttttcaaatcatttccttgattgctaatatattagctggtgataattaattaattagtagaatctttgtggtagtatacagtatgataatggctcctctatatgcatgcgtgtgcgctaaagacactttattgtaattgggttatgatgatgtataatttaatgacatctctctgctttgtatttgttgtcgttatcacttttatactcatttcgtgataggctttattttcttccagaatttctggataaataattataaagttatgtttctttgtagacttttttcttaaggtcgccaatgttgggtggttgacacctaagccaggttattgggcatatggggccgatttaggctggtagtacaaatcattgtactactttgattctaacgttattttgcacttagacacgaagactttgacttcctcttcaaaacacctttacatttgtagcaaagagggtactttttgaattttatttatggatttggatcttcctaagttgctcaaaccagtgggggagcggtaaacaatagcttacactttcattacagagaagagagaagagacagaaccaaaagataataataattgattgtgtctgaataaaacaggtttctcaagctgacaaagaaaagggaaaatggagtttctcgtatgcatgttccgagtgagctaaaccatccaaatcccaatcaccttccgagaaatcagattggctctgttcctgttacagtcaaagtaacaaatcttcagaaatctccaaaagaataaggtgcaaaaagtaaatggtttttattgtatacaatacctgtgtcattaaggaattgactatatcatctaaggaaccagcatcagaagccatcaaaccactctgaagcttctgttgtcccatgagtaaaccttcgtttggattgctacttctaaacagttgagcttctgtcactggacctgagttgtttgcaggctgctgattcatctgtaatggataaaagaagtctgtttgtgcagcatttgtggatccaaaacccgtgtttctgcagagagatgccggatttgtatccaggtttgggtttactagcggactagctgagtcgcagaacgcattccattccaaggtgtcaggttttgaatgaacatcactctgtggaatgttggttgacaatgcagcgtttgaccaatgttctagacgcttgctgatctcgaaatgaggagaaaaacccgggtttgagggtaaagatgatgactgcgggttaccctcgagaagtaacagattactgggagctaccattggagagttttgttgtgaagtaaagcttggaaaagccctgttgatgttgttgttgatctgaagctcttctagcggcaaaccctgaagtatgtttcctccatcattatggttacgaggaaacgatgatgagactggttggaacattcctgctccaagggaattcagacgaccaagattcctatttgaagagtaatgcctcatcattgtggttccaccatggaactgaccggatccaacaggtattccgcggtggtggtggtagaagccaccaagtcctttctgagaattcatttgcataaaatgtgagtcaatagccgccctgttagcttgttgaatggcgtcatcagacaccttcttcagagcaacgcggaatttctgcaaccaaaagacattacaaatgtgtttaatggaatcatacatatatcaacactaacagatcaaatctgaagaatcatagtctaactctcacctgaaggtggcttgcaacattctctctagtgagtttgtcaacattcatcagatctagaatcttttttggaacagctcctgcatcatcaatacttataaatcagaacatgattcacagctaaatgaaaactagaggtagagagatcaagaaacattactctcaacgcctaaatgatcaacagctgctaggaatttattgtgcagctcatgcgtccaaagaacacgaggcttcttctgcgccgttggatcatcattatcattccctctttcttcctcttcctcctcttcatactgttctttacgttttctgtttgctttatcacagtttcctgaaccattactcacattgctcttattcttcttaagtttgctctttctcacaacatgttgccatatgttcttaagctcctcaattcgaaccggtttaagcagataatcacaggcaccgtgcttgactcctttcatcacatactttggatcgctatgcgcagataacactgcaagaattcaatcatcatgttaaagattcaaacagtcaaatctgtctaacgatcaaaactttctctaggaactatgaactagaacaaggagagctgcatacttatgacaggtaagtccatttcaagaccaacaagctcaagcagcttgaaaccatccatgtctggcatgtcgacatcgctaataacaagatcaaacttattcttgttctccctcaacaactccaatgcggtctgtgcctgattcgttgttgtaactgcacattacaataataataatcacccacaaagtttcagttttgactcattcaaaagtagtaaagcaagaaccaatggctctgtgacacatggggagcaatcaaatatgtaataattccccaaagtctcaatttttacagaacaagagactgtttcaaatcgaacgaacaagaaccaatgacctttgaaacacaagtgaagcaacaaaatctgaagcatggatttttaaaagtaaaaaaatatgcagagagtgaatctagctaatatagtcttaattgattcttcaagctcgtcttcaaaaatataaaaatctagagaggaatcgatttatggtgttatgacaagaaacgaatctgatgttaaattttgtagcttaaccaaatccaaaatctagaaaacatcaagaaatttggtattaaaaaaaaacaaagagagagagagagaaggaaccaaaccgtgatattggcagcgctgaagcaaagtctggagaatacggagacaagtctggtcatcgtcaacagcaagaactctcatcccaaccggaaactggtccaagacttcaatttcttgctccatagtcatcgccgtcaaagattatgaattgaagtagaagaacaaacaaagttcggattattattattagtagagaaagagacaaaaagttgtatggcagagtaaaattttcttctttggcaaaagagaatctaagactacatatggtttctgaaaactctgtaatgatcttcaagactggcgaattaactcatttatggaattctcttttcaaattttaatcatttctggtaaattttctttttgacataagaaaaaaacaaaaaacattttcagaggagaatctctgagaaaattcagtggaaccgatcggtcatttgagcgtgataatcacgcgccaccttttttaaattagtttggtttcttttgactgtgggaataatattttttagtttagtgataattaattgaaaaggaaagaggatcataatatttttttttttaaatggataaaaatgtgaaagtgtttatgtaaatgattctgcagatcatgtaattaatttagagatatgtttgtgatattgtaccaagtattcaaggcaggaaagaagaatttgagttattaccataacttcaaaaagaattgaatactttccttaatctgtgtcttaaggaatggacaactaagttgagtatctcataaaacggatttaccataagaattagtgcaaattatggtattatgattttaaaatatgtaaaagaaagaaaaaaaaagacaggctttagtgagagcatgcatggtgaaagttgggaagtgcgagacacgcgtgaccgtggttcatggctttttcgcttatctcgtacaggttctgaaagatttagcaaaattaagtatcccatagtaacgaccaataatggctaatgccgatattattcaaacctaagacaagactatttttaacgtcagagaaagacttttaaaattgatgaaaaaaaaaaaaaaaaaagacttttaaaatttacaccattacttggataattttacactcttaccatatgaaattaattttaggaatatgtataatcaagaaacacatgttacaatggttcacaatgtttataaaactttcaagtcaacaaattaaactcatagcacgatatttatcaccgaccaaatgtatcgtacgctcgaattaaactttgaagtcaacaaagaaaactgctgtcacaagtctattgttacatgatattagtcattgaatttagttgttaactacaaattatatattatttatttatttgattgtccgtttaaatttagcaaaatacatttatataactatgacaagacaaaaaaaagccataaaacaaaaggcaagaatttcttgaagttgggttccatccgcatcttcagcctacaagcttggtgggtgcaaaataagatcccaatgattttattatagtttatgaattaattttgtatgatttcttggattaaccacacagcgtgttcatttccgtgcctctccttttcttatagaaaatagcgtacttcggatcaataatatgttttggctagcttattaacataaaaaaataaaacattattacaattatgcatcgtttttattaatgtaaaataggttatcagttagttttgttttccaaattagaatcataaggtttaataaaagtatcaccagcataagatttactaaaaaaaatgcaagatctagaaagagatcctaaatgactttttgaatctagcctaagaaccttctacaaatctacgataatttatttagtatatgaagaaaattagagaaaagttgtattctcattgtcttgtgacaaagccttgataaacctagaataaaagaatacagaactagattttacgattttaaaagaacatcaacatatgttcgatgcaatgcattggaaaataaaggacaactttctaatacaaatcattatcattagctcttccaattttattttattttgtgtgtgtgtatgttaaatagttgcagatgacattagagagattaaagaaatcagttttctagaagatccatgtaaacatcaaatctgtaaagattctacttcttaataagttattggaagtcacttgtcattagctaatacctactgtcattggcttatggtctcatataggatacacacatgtatattagtatatagtatatatctattcacatttaaatatgagaaattaacagcaacactttggtgtaatgtttaattttaagaaaaataattaaagagaaagatgctgataaaaataataataaaaagaaagaaaataagtaataataaaatggaggaggaaaatcaagattagccaaaaattgaggtaatcttgtctcccacaagggctaaccacaccggtcataaaatatgcttcttgttcggttgcttcctaatcacttcctactctattactcttactagattttccacatctaaataaaactatgacatttaaatgtcaactctagaacgccagataatagcagttactattccatatggagtagtatatagcagtactaataagtaataacaatcattttctttttctttcttattattaagtaattattaactaacagctagcttttcacgatggatgatgatgtatatgattagttcatcatggctcgttttaattgatcgaacattttttaattgatgtatatgaaagactttaatctatttttctttctttggctcacaccaaaaggggttaattttttaattaataaccacactaaaagacacagttattaaacatcccggtggagggttgggcccaagttctattgtttattactcatctaaggcccaattgtacattttgtttcagataaaagtaactaaagccaatattactactttttttttttgtcaataagccaatattactacttttaactgataaaacagtttaattagaagatgtgtaaacatcgaaatatttcgtgtttattgtgagatgaatgaatttagctttctcaaccattgaatgagctcaatcctatccttattcatcatatattcatgcaagaaaaaacaaagctctgcgtcgattcctcttactcgtaaaaactcccgaatcgctgtctgaaaatcatacttcaaattcctgcaaagaaacaaagatcacaaggttcagtagctgaattcaactaggcaatttccttgactgtatcaacaaattcaagaccagttaaatgctacactctacatttaaagtgattcaagaaagcagagagattagtagtaagtacccaaaattaggtcccatgtaaggctgaccagtgattttgttgcgtctaagcttgtaaagctttcgaatttcaatacggttaggccagacggagcaaaggaactcgatctcttcacttccatcaaccttggaaatgtcaacaagcaagctaatatgaagacggacatcgtgccctgaagcatctaaaccggctcttggaacattcataaacccatcaaacatagttgcttccattttgatatcctcatcttctccaaacttccctttcatcacaatgcattgctcaccgggacaatcctccacagagaacgatttgaattcagtcgctggctgcattatagttttaagtgaaacaaaaacaaatcatcagtatctcttctcttccgatttacttggatcttgaacaaataaagtctacttcttgataaacaaattgattcaaatacagtgatacttgtctccctcatctatctacttcaacagaacaactgaattacacaaatccgaaatctaggactagcataaacattgattccagctgtctagatagtgattataaacgaaatagatgatacctgatgcggaggagcataatcggattgatactcgatctcgtttcttatgattcgaagaatgttggaccggaagggtgatttagctggcgatgtggtgacgtctcgtgattggtgatttggcaagagagatttgcatcgaacccaagaaattagggttcttgaggaatgagaaggagaaatgcgtgatttttgaagagtacggagcagaagagccatcgatgttcgtcgccgacgtttagggctcttccgaggttttctctgattggaaattgaactgaatcgaaatagcagagctctttgtgggctttttggatgtccaatagtccaatacaaatattaatgggcttccatgaataaaacattgtttctgagtttttaaagcccaattttgcgtttgtgtaaaaagacaaatagccaatgaaagttgtttaagaccatgcatgaatcatgaatgttgtccatttatttcaacaagaaactatattttgaacattaaaacagtggtgtttagatagtagttgtctcggatgggctagacaagttgtttcggccggggtaagggttaatcacttcttgaattggtttggtttggtttggttcatgcatacaatacaactaagtttcttctgataaataataattattatttctgatcattttgattaataatgtttttttatataccgcatgaatggtttactccaagcacgcaggattccgaatccaatccggcttagttgtgtgttatgtattcattgtacaatagtacatgcaagtttttaagattatttatacaagttagtcaccaccaggcgaagtccaaggcaggtccgaccaatgcaaagatcgaataaattcatcaatcaatatataattgagttaaagatttcttaattacgttgacttaactctaaaagtctaatattggtgacgttggtcacgctatgcacttcactagtgaaacagcaaataaggcattaactaatcactcgaatttcattgcgtgtaatcaacagacgtataatgatagaaaaaagcagcttatgcatggatcttgcaagatgtgagaaaaacaatattaactaataattacagagtattaatcgaaaaacaaattattaaattttgtttcttaaaaaaggtttattattaatgctcttgattcaatgcataaatccttgctcgagccattaatttttttaaaaaatggtttttttaattactgctctttttgttcattgtcaatatccttactcgtgcatgcattaataaaaattaaaattggggccctatagttttgatcatcaatcggtaggtgtatgtctcatgcgttcatggtgttgaaccgatcatctctgtgtgtgtatatatatagagagacagacactactcttcaatcattcaaacaagaaatcaccaaacacacatctcttctgcactctcaaaacactatggatacttccctcttttctttgtttgttccaatccttgttttcgtttttatcgctcttttcaagaaatcaaagaaaccaaaatatgtaaaagctcctgcaccaagtggtgcatggcccatcatcggccatcttcaccttctcggtggcaaggaacagcttctctaccgaaccttaggaaaaatggctgaccactacggtccagccatgtcgctacaacttgggagcaatgaagcatttgttgtgagcagttttgaggtggctaaagattgttttactgtgaacgacaaggccttggcttcacgtcctatgactgcagctgcaaagcacatgggttacaattttgctgttttcgggtttgccccttatagcgctttctggcgtgagatgcgtaaaatcgcaaccatcgagcttctttctaaccggcggcttcagatgctcaagcacgttcgtgtttctgagatcacaatgggtaattacttttcttaaaaaccatgtctaccgtaccaaacgtatataacaataattgtcgatattgttatatgatacgatgccatattgtcacatgcaggtgtgaaagatttgtattccttgtggttcaagaatggcggtacaaaaccagtaatggttgatctaaagagctggttagaggacatgactctgaacatgatcgtgagaatggtggcaggaaaacgatactttggaggcggaggctcagtatcgtcggaggatactgaagaggcaatgcaatgcaaaaaggccatcgcaaagttctttcacctcatcggtatattcactgtgtcagatgcttttccgacactaagtttttttgatttgcaaggacatgagaaggagatgaagcaaacgggaagcgaattagatgtgatccttgaaagatggattgaaaaccatcgacaacaacgcaaattttcaggaacgaaagagaatgattcagacttcatcgacgttatgatgtcgcttgcggaacaaggaaaactctcgcatctccagtatgatgcaaatactagcatcaaatctacctgcctggtatacctttctatacacaaatcttgatttttaagaaaaaaatatgagataactaaaatacttaccaaattgggatttaacccaaaatataatgttttataatatataagtttaactagaaatgttaggtggagagacgcacttgggtcatatttaaaagaaatcaattacaacctaaaatgtgatgtggagattaattagatgatattgactcttttaatgtgtgtgatataaatatactatgaataatcaggcactgattcttggaggaagtgacacttcagcatcaacccttacatgggccatttctcttcttctaaacaataaagaaatgttaaagaaagcacaagatgagatcgacatccacgtcggcagagacaggaacgtcgaggattcagacatagaaaatttggtgtatcttcaagcaattatcaaagaaacattgagattgtatccagctggtcctctcttaggccctcgagaggcgatggaagattgcacggtcgctggttactacgttccgtgcggcacaagactcatagtgaacgtatggaaaatccaaagagatccgaaagtttatatggaaccaaacgagttcagaccagagaggttcattacaggagaagcaaaagagtttgatgtgagaggacaaaactttgagctgatgccatttggttcaggaagaagatcatgcccaggctcttcattggccatgcaagtgcttcatttaggtcttgctcgtttccttcattcatttgacgtgaaaactgttatggatatgcctgttgatatgagtgagaaccctggcttaaccattcctaaagccacgcctcttgaggttctgatcagtccacgtattaaggaagaactttttgtgtgattaactattccagaaacatataacttcaatacggttattgaaggtgcattttgatgtgtgtgtgtttttcttttgttgaataaaacctacgtttgtttgttttctctttaaaataaactagattcaaaccgcacatttgtgcggtattatgttcgtaaacgtatttgtttaatatagtatttatattttgaactcaaatgagtctagtattaagtttggtttcagtttggtttagataaaacgagtgatcgaattttattttttgttaattagtagaaatgtctatttcgtgacatgaaacccgtccaaacccatatttgtcaagaattttccaccacatttaaccattcccatttaaataatatattcgtttcggaatgtatattttagtctagctaataaatcttaaagaaagactatttaattactctatcgaaaataataaacctgcaagaatgtgagaaacttactgaacattccaataaaagaatttaaaagttatttccaactgccaattttcaaaaaaaaaaaaaaaaaagttgcctacattcttgattgctctgttgctcaaggagtcaaggtgtgtggcttgtaggattctcagtttcttcactattcatcagcctttttaagttacagtaatcgttgtatgaaacaagcgtgcacggtcgtgcccgttttgtcgaagcagcttgcaagagttaattatggtgatgtataattagtgtatttttaattatatgtgttttaatttagattttctatgttttaggacatttacttttgatttagttattattatgaattcagaattataaaatcatatctaaatttcaatattttgaatataataatataatatttcaaaacccaagtagataattggtcaagaattggttaagataaatggttgaaaatcattcagaaatgttcaaaaaagttcgaccattttaattttcaaaatgttcgaccacttatactcgtcagtaattttaaaaaaaaatcgaccaaatccaatttgcgacacgcgcttttgacgacttgcttttggtcaaacatagtaagaaatggccaatttttgaccaatctattgacctaattcatagtataaaagggatagttttcttgtagtagctcttcaatcattcaaaacaaaatatcaccaacacacatctcttttgcactctcaaaacactatggatacttccctcttttctttatttgtttcaatccttgttttcgtttttatcgctcttttcaagaaatcaaagaaaccaaaatatgtaaaagctcctgcaccaagtggtgcatggcccatcattggtcatctccaccttctcggtggcaaggaacagcttctttaccgaaccttaggaaaaatggctgaccactacggtccagccatgtcgctacgacttgggagcagtgaaacatttgttgggagcagttttgaggtggctaaagattgttttactgtgaacgacaaagccttggcttctcttatgactgcagccgcaaagcacatgggttacgttttctggctcgagatgcgtaaaatcgcaatgatcgagctcctttctaaccggcgccttcagatgctcaacaacgttcgtgtttctgagatctcaatgggtaatttaaaaaaaccatgtctaccgtaccaaacttatataacaacaattgtcgatattgttaattgtgatacgatgcaatactgtcacatgcaggtgtgaaagatttgtattccttatgggtcaagaaaggtggttcagaaccagtaatggttgatctaaagagctggttagaggacatgattgcgaacatgatcatgagaatggtggccggaaagcgatactttggaggcggcggcgcagaatcctcggaacataccgaagaggcaaggcaatggagaaagggcatcgcgaaattctttcacctcgtcggtatattcaccgtgtctgatgcttttccgaaactagggtggcttgatttgcaaggacatgagaaggagatgaagcagacaagaagagagttagatgtgatccttgaaagatggattgaaaaccatcgacaacaacgcaaagtttcaggaacgaaacacaatgattcagacttcgtcgacgttatgttgtcgcttgcagaacaaggcaaactctcgcatcttcaatacgatgccaatacgtgcatcaaaactacctgcctggtacactttatctacacaaatcttgacgtattttagatggactagatataaatacctaaccaaattgtcttggaatcttacccaaaacttattgtttctaatatagaaagttggttacttggttatatgaacgagatattaactagataggttaggtggaaagacgtaattggaacgtacttaatttttaagagaaatcacttacaacctaaaatgtgacgtggtgaatcgttattagatgataattgtctcttttaatatatgtcataaaatgataataaattgaataatcaggcactaattcttggaggaagtgagacttcaccatcaacccttacatgggccatttctcttcttctaaacaataaggacatgttaaagaaagtacaagatgagatagacatccacgtcggcagagacaggaacgttgaggattcagacataaaaaatctggtatatcttcaagcgattatcaaagaaacattgagattgtatccagctgctcctctcttaggccatcgagaggcgatggaagattgcacggtcgcaggttacaacgttccgtgcggcacaagactcatagtgaacgtatggaaaatccaaagagatccgaaagtttatatggaaccaaacgagttcagaccagagaggtttatcacaggagaagcaaaagattttgatgttagaggacaaaactttgagctgatgccatttggttcgggaagaagatcatgcccaggcccttcattggccatgcaaatgcttcatttaggtcttgctcgtttccttcattcatttgaagtgaaaactgtattggataggcctgttgacatgagtgagagccctggcttaaccattactaaagctacgcctcttgaggttctgatcaatccacgtcttaagagagagctttttgtgtgattatctattacagaaacatttgacttcaatacggctattgaagtgcattttttatgtgtttgtgtgtgtgttttttttttttttttaaaaccttcgtttgttgtttcctctttaaaattaactagattcggacttcacatttatgctaagttatgtctgtagacgtattggtattcatatttcaaactcacaccagtctttggtttcaattcggtttagacgaaacaatgatcagacatgtttttgttatcacttgaccatcttagcatttgttttaatatagaatttgaaaaaaaaataaaaaaaattaaagttagagtttttagttttgtaactgtccaatggtagactctaaagtggggctcttagcgtttttttttatttttgaatcaaaatgaaatttgtgatacaaataatacaaattaggatcaaagttgtatataatcgtaatcgtcatcaacttcataaacccaccaaattggaatggagaagttaacaaatatcagaacaaagctagtcaaagcaaaatcatacgaagcaaaagcaattcaatggagaaaaagacaatcaatattgcttgtgttgcaaacttctccattccaatcaaccagctttcaagttatggcgacaaactacaatcattgcgtaatcaagaacaaataagattatgaaaataataccaaatgttgaagcatcagactctgcttattcatcctctgcatcctcttcatcttcctcaatattatccccatttcattttcattatcctcaccacgaccagcaaccattaactctaaatttcctatgcaaagctcatataccagattcagaacaatatgagaaaagacaacctcaagcccaagaatcaaaatatacataatacaaacgactgaacatcaacaatctctctgacatataatccattaccaatcactcatacataacagacaatgagaaagatgtaaaatttggattaacattagcagccaaaacaaaagaagcactcaaatttctatacaaacgaatcagaacaagctcaaggcactcaaatttggattaatacaacacaaacttacaaccgttaactgaaaactcaattaccgaccaacagaggattctaacgtcactcacaaaatctctagcaacaaaacaacacacaacagaaaactcactaatcacgcgaattcaaagatacctagattgaatcagcagtaaagttagaatttctattgtacttaagatctttctcgtcaaaagagacggtggcttttgttcttgatatatctcttcccaatgttcctagaactggtcgacggagccagtgaacccgccttctcattatccaaaccttccttcctcgcgatatctcttcccaatgtgcctagaatcggaaacgaagcggttccgatcaaaaattagggtttgtgaggtttactcaaaataagtctaggaagaataagaagaatcaggaagcagaaggacggccggaggtcataaacatcaaacgctcctccgatttgcctccgtaacagaagaaaaccgcgtaacagagagagaggagaaacaaatcaattttttttgctttaatattttacccttcaaaatgccacgtcaccgcttcttagaagggtttgggcctctcacaaaagaagcaactcttaatattaagcccaattttacatttatattttacacaaataagggccacctaagagcccaccgatagactgctcttatcagtaaagacaactacataaaaatgagagaaagtagacatgtcccgaaatggacatgaaacccgtcgagtcctatactcgtcaaaaagatttcgtctcaaaaccatttgcgtttaaataatatacccgttttgaattgtatattttagtctaatacatcttaaagaaagattattcagttagtctatcgaaaatattaaatttaagcaaacaaaaagattagtgcgaatatgatctctcaactgaaagcaagagataaacggctactaaggtaagaactgagtgaacatttcttaggttttatttcacttgaagttttgatatatcataggttcccttttatagctaaacaatgctagggttttacacatatcaagactgacacctgtctcactccttattaggtctcgcaggttgccagacaatcaaacctatttgtggtgatgattggatccgtacagcccttcatcacgctcctcttccttgtatccactctggttttgtttgcttgtacaggtgggatcgaccgttggctgatgtaagaggacacagcagatttgggcttcagctcttttattgttttgttgtcattgggcttctggcccaataggcctttgtctttgttactcacgacactgtcgttttgagtcttcgtttcgacttctccaaagggatcttgaagctgtctggattcagatcttgaaggtgatgtcggagcagtggaggtcatgctaatatcaacaaccaaacctgtaagcatatgagaagcttccaataaaacattcttaaaatttattttcaacaactgccaatgtattaaaaaaaagcaatctcatgaattgcctacacgctaattaggcgggcgaaatttgttttatgtgtatgtggtatggtatttgtttttcctcgccatcctttcctggtaaaaccaataattttttatatcacatataaagttacgtgctgaacgaaacaaccgattattattaagaatccatgttgaaatagagaaaatggattgtgtgaatagaaaaacaaaaacgaaaagtcgacaaaaaaaacaaaaaacagaaaaacccactaaagtcaagcgttttgtttcaaccatgttatagtttagaactttataatcagaaattaattccacgaaaatgaataaatgtcagcagtcaaaccagaccattaaaagaaacaattaccattaaaagatatattgactaacaaaatcaatacaaacctttgcgtccatctctgttatggacacagttgacaattacaaaaaccctccatcttcctgtctctctctatcatccatgacttttttttttctcaacaacaactaattattatccaaagttcttagataatgagattaatacatgctatttcttgcccaactaggcacaatagaataaagcttaggatcataattcaaaaatgaaagagactcccttgatactctgccaatgtgtgccctctcttggtatgaacacaaacttgacctcttcaaattgggggagcaacctctgcagatcatccatgacttaaactgcacaataattaaaataggaaacttaagttcatcaagagagaccaaaaatatcacaaaactcttatttataccatttctattggcaatatttaatagttttttataattaaaataataaaataaaagagaaaaaaagtaaaaaaattctcgcttgaatttttttgaaatactctatacaactcatagtgacattttttttttcaattggttcaatttttttttactaaaaaaaaaattttaattacttttttagaaattctttggggttctccttgatggaaaaagatataccaaaataggtaaagattcttgaacaatggtgtaccatctacgacttcaccgaagtgagctaaagcatccctttaacgttggtaatcagttacccatgacacacactggacatttaccttcatcactctggtcgtcctgagacttgaacagtttcttgtttctgttatcatttacaacataaggcccacttcttgcccacacacagtttattactcatcaatttctctaatatactattactctataacaacaaaaaagtaacattgtaatttgtacacatagcgtttgatctagctagttctatatgtagaattgatgttagcaagtgaatcaaaattttgcggagatgatgtttgaacatgggtttgttcattgtgttacccacacgaagccaatttgattgttcgtccagatccttgtaaaaagaacacatatggatcatttagtcgcaacaataaagaagatgtatcagagctacatatgtatgtttcacagtatttctcctctcgattaacaatgaactggtgcaaggatcacccgattcgttcttgagggaagtatcttgggaagcagatcgatttagaggcaaagagggctcaaaagaaatcgttgatgaaatcgctcaaggtctcgcttgaaggttcgcagtttcttcactaatcgtgagcctttttaaagttgcagtaatcgttgtatgaaacaagcgtgcacggtcatagtcatgctcgttttctcgaggcagcttgacaagagttaaattatggtgatggataattagtgtatttttgaggctgtctcaactgaactttcatttaatgacttggctagcgatacagaaccgtctagccacaaaagagagattattaaagtggaatggcgaggcaaatggtggtagtgtgttttgtcaaacggaaatagaaacaagagatcacctatttttctcttgttcatactctcatgcttggtcagctcttactatgaaatatatgctcggctctcgcttcacgacttgctgtgattctcttgttgccctatctacgaccttttcctctccacaacttcatttgtttgtgtttagatatgtctttcaactcactatacacaatctatggaaagaattaaatgccccataactcagagctcccacttctttttaaatcttgttctattaagttttcaaaattttctcggttttatgttgaatttattgtaaaaccgtttttgaattttaaactcatacaaaaacaaaaaaatataattagtgtattttaaattatttgtgttttaatatattttttattttatcttttaaaacatgttttttatttgagttattattatgaattcagtattataaagtcatatcttcatttcaatttttttttgaatataatgttatataatatttctaaacacaagtagataacgttggtcaatatttggttaagataaatggtggaaaaatattcagaaatgttcaaaaatgttcgaccattttttttatttcaaaatgtacgtcagtaactatcgattttttttgaccatatacaatttgcgacccccgcctttcgacgacttgcttttggtcaaacagcagtaagataggcgtatgtctcatgcttacatggtattgaaccgataatatgtgtgtgtatatatagagagacagactatactttttaatcattcaaaactagaaatcaccaaacacacatctcttttgcacgctcaaaccactatggatacttccctcttttctttatttgttccaatccttgttttcgtttttattgctctttttaagaaatcaaagaaaccaaaacatgtaaaagctcctgcaccaagtggtgcgtggcccatcatcggtcatcttcaccttctcagtggcaaggaacagcttctttaccgaaccttaggaaaaatggctgaccagtacggtccagccatgtcgctacgacttgggagcagtgaaacatttgttgtgagcagttttgaggtggctaaagattgttttactgtgaacgacaaagccttggcttcacgtcctattactgcagccgcaaagcacatgggttacgattgtgctgttttcgggtttgcgccttatagcgctttctggcgtgagatgcgtaaaatcgcaaccctcgagctactttctaaccggcggcttcagatgctcaagcatgtccgtgtttctgagatctcaatgggtaattaaaaaaaaaaaaaaacgtatataataataattttcgatattgttaattttgttatgatgcgatattgacatattgtcacatgcatgcatgcagttatgcaagatttgtattccttgtgggtcaagaaaggtggttcagaaccagtaatggttgatctaaagagctggttagaggatatgagtctgaacatgatggtgagaatggtggccggaaagcgatactttggaggcggctcgttatcccctgaagatgccgaagaggcaaggcaatgcagaaagggcgtcgcaaatttctttcacctcgtcggtatattcaccgtgtccgatgcttttccgaaactagggtggtttgattttcaaggacatgagaaggagatgaagcaaacaggaagagaattagatgtgatccttgaaagatggattgaaaaccatcgacaacaacgaaaagtttcaggaacgaaacacaatgattcagacttcgtcgacgttatgctgtcgcttgcagaacaaggcaaattctcgcatcttcaacatgatgcaattactagcattaaatctacctgcctggtacatctttaactacacaaattttgatgttttttagatgaactagatatataaacctaaccaaattaactgggattttgtccaaaaattattgttttctaaaatacaaagttagttatataaacaagtttaggtggaaagacgtaaatgataacatgtttattttgtaagaaattacttcaaccttaaattgatgggattaggcgaatcctgattagatgatacttataagtatattgttttaatgtatgtcatataatgataataaattgaataacaggcactgattcttggaggaagtgagacttcaccatcaacccttacatgggccatttctcttcttctaaacaataaggacatgttaaagaaagcacaagatgagatcgacatccacgtcggcagagacaggaacgtcgaggattcagacatagaaaatctggtgtatattcaagcgattatcaaagaaacattgagattgtatccagctggtcctctcttaggccatcgagaggcgatagaagattgcacggtcgctggttacaacgttcgtcgcggcacaagaatgttagtgaatgtatggaaaatccaaagagatccgagggtttatatggagccaaacgaatttcgaccagagaggtttatcacaggagaagcaaaagagttcgatgtaagaggacaaaactttgagctgatgccatttggttcgggaagaagatcatgcccaggctcttcattggccatgcaagtgcttcatttaggtcttgctcgtttccttcaatcatttgacgtgaaaactgttatggatatgcctgttgatatgactgagagccctggcttaaccattcctaaagccacgcctcttgagattctgatcagtccacgtcttaaggaagggctttatgtgtgatctctgttccagaaacatatactatatgacttcaatatggtaattgaaggtgcattttaatttgtttttttaattttattttgaataaaacgtacgtttgttacgttgtgtacttttttaaaataaataaatgtggaaccaaatgtattctttaaaatatatgtattatttgatttcatctattgtgtaaaactttgtataatataatatatttgatttgacggcaaaaaaaacacaaacaaactgcattttcaattttgaactttgtaaattaacagaagcggaaatattttggggaaaaaaaaaaagaaaaaacagaaacggaagtaaataagctttttaggcatcgatcgaattttccaggaaaccccgagagaggggaagaagaaactgacgaagacgaagtcgaacccttaaaaatccggtagagcatccgattctccgttgctcgaaacctctcaatcgattttttaaaaatttatttgcgatgcattgagccgccgtcaaaagagagagagagagagagagagagagagagagagagagatgttttgcagaaacgtatcggtgaggcggaagaagaattctggtacggtaccggtttatctgaatgtttacgatcttaccccaatgaatgtttatggttactggctcggaattgggatctatcactctggtctcgaaggtaaatcgttttttttccttctcgattctgggtttgattgttgttctaagattgcggagaaagatgagacaatagtaggtcaattttgttggattgtaatattaattgttgaaaaaatccattgtctgtattgttgcttggctttgtttgattctaaagtctgctttgatcgatgaaaactatttattgttaaagagtagaattgacttttggtcatagaatcgatttagagactaaatgtgttttgatgataacaacttaggagggtagagttttgtggccgttgtttgaacaatgactcagtcacacacacgccatacgttgttgttaatcctatattgaatgttctctcgtggttttggctattccttgtttgtagttcatggggttgagtatggatacggggcacacgagaaatcgagctcggggatttttgaggtggagccaaagaagtgtcctggtttcacattcaggaaatcgattcttgttggtgaaacagagatgaaggctaaagaagttcgaagctttatggagaaattatcagaagagtatcagggtaacaagtaccatctcatcacaaggaactgcaaccatttctgcaaccatgtttctttgaaacttactcacaaatcaatccctagttgggtcaaccgtcttgctcgcttaggtaacccaaaacttcctctacaatagaatctttcaggggatcaaataagtaatgttgtacattggtttcttttgaaccttcttaaggtttcctctgcaactgtgtcttgccggcttgcttgaacgagactaaagtgaagcgggtaggaaaagacgggaagctgctcttggaaggagaaaatacgaagaagaagaagaggaagaagaaaatacgaagaagccgatcaggtcctttatcttcgtcttcttcaaatgcaagattagataatactcctacacataacagatcaatatcaacgggtaatcctcctctttctgcttctccatcttgtcctttgagacctcgacttccttctgttgcatctggagctgaagatcaaaatcctccaagcgtaagcgtcaagacatgattatttttcattgtttgaacagctgctagttatatacttgtttatgaatgcgaaggtggtgcttgtgctttgttctcaagttatatatcctccattcgtttggttatacttggtataatttacttataggagaatcatgaatctctctctgtagatactaactgtagagtgaattcaacatttgtttgttatgttttgatgtaaaattttgaaaattgtacgaattacttgtttgaatatcaacaaatcgaagtaaaatagctaaatattttggaaacaacaagtgttttattttaaatttctaattaattcttaagcaataagtcccaaattttcacaaatagagtttttattaaaagaaaaaaaattgatgagcgtaaaaataaaaaaataatgaattttattttattttattacagaaccaggaagtggcataaaccctagtttgaccttttcagaacacaactcactataaatacctatcaaaggacactcttccgcagctacaacgaattcccctggaaccctaattcaccgttcctgtgaaaagctcgcatacataagatctgttctatttctcgctttttgtttctagatttcagtctttgctatttcattatcgttctggtttttatatttgttgaaatctgttatgtaattgaaactgttggctctgccattttgattgaagtgggattccttaggctttgattttggttagttctcagatttaggtttaaaggttcttgttttttgatttgaagcgttatagcaatcccaatgatgacttattaagattaaaaatgttaaaagtagtgactgatatcttttgatgaaattttagctctgagggatttgatttgttctttgtttccttcttacattccgttgttggacatccattgtgggttaatttggtgagtttttgcttttgcttgcttgatgaagcatattgatgcacacgaccttagctgcatcccaatgatgaatgatatgaaaaaaatgttaaaagtagtgactgattataccttgattactagtcaattctgagggattctatcagctaagctaaattcaatccttttgcgccatctctttgtttacttaactctctatgtgcccttcgatgattaataatatattaatggttaaaagtagtctgatatcttattgatgaatatttcaaatccgagggcttaacttatttcttataaaagttgtgactgatagcttgtgcacaatcttgttttcattcttggtatcatctaagagatacctcaacgccagcttctgcagtgaagtgcaatgtcgtaagtacgattccacccggcagaagaaatctctctcgattgcacttcatctgcagaagctggcttttttaggcagtgggagtgatttttttggcagaatatctccattgtattatgctcttttgttttccctggtgtgcttgaccatgatgaattcgctagtggttcacaattttgatagaatagttggattaaatggataacacagcgacaccatctattaatgatacaaccaactaaaaatgttattgtccaacctcaccaccaaatcatctttcgaaagctttcctttgtcttgttaaaatcaactatttaaagatgaagtatacaaagcttagcagtacttgttggacccacgtttgatatttttggggttgagatgtctgcaagcgtctttcttaaagtccaaaagaatgtgtgtgaaacgttgactttctgcaaggtttaccactgtttgtgcgcttagcttcgtttggagaatcttcttcttctctttctttgtagaccggctttgctttgcatatgagaggatgaatcagaatgaaggtgacgcccttgtcgattccatcaaagcgaagttagcctttttatcttctctttccaccaaatgctgtatatacaaggtacctaataagctccgcagactcaatcctgatgcatatacgcctcggcttgtgtcttttggcccgcttcatcgtggtaaagaagagcttcaagctatggaagatcagaaatacaggtatttgctgagttttatccctagaacgaactctagtctagaggaccttgttagacttgctaggacttgggaacaaaatgctcgcagctgttatgcagaagatgtgaaacttcatagcgatgagtttgttgagatgttagttgtagatggtagcttcttggttgaacttcttttgaggtctcattatcctcgacttagaggcgagaatgatcgcatatttggcaattcaatgatgatcaccgacgtgtgccgtgacatgattttgatagaaaatcagttaccctttttcgttgtgaaggagatatttcttctcttgttgaattactaccaacaaggaacaccttcaatcatacagctcgcgcaacgccacttcagttatttcttgagccgcattgatgatgagaagtttattacagagccagaacattttgttgatcttctgaggtcttgttatctgccacagtttccaattaaattagaatacactacagtgaaagtggacaatgcacctgaagcaacagagcttcacactgctggtgttaggttcaagccagcagagaccagtagttgtttacttgacattagttttgctgatggagtactgaagattccaaccattgtcgtcgatgatctcacggaatccctctacaaaaacatcattgggtttgaacaatgtcgttgctcaaataaaaacttcctcgactacatcatgctgctcggttgcttcattaaatcccctacagatgctgacttgctcatccacagtgggatcatcgtaaactatctcgggaactcagtagatgtttcaaacttgttcaatagcatcagcaaagaggttatctatgacagaagattctacttttcgatgctctctgagaaccttcaagcttactgcaacacaccatggaacaggtggaaggcgattctgagacgtgactacttccacaatccttgggcagttgcttctgtttttgcagctttacttcttctccttctcactttcatacagtccgtatgctctatcttggctctgtaataagtctattggtcaataaaactaaacatttggctctgtatcttaatgtgtcaaaattatctttggtttcacaatgatccatgagatggcactgcttaaaagaaccagttggtgtagaagtgacactaacaacagttccaggcaagatacgcaaacaaagaaattatatagtaaataactaaagtgactaaaactgatgcttgaaactaggattggaacctattaagcacacaatgtacaattgcaagaagaagtagtgtgtttttagagcctacagatgtcaaaatcagtgatagaaaagaacagctatttgtttcacagacatgtgagacataaagcttgctctaggatcaatcacgtcctacgagcaagtacaaacatttgtaaatcaataagagtacaaaaggttatatcagagctttcgtagaacagccatttcccccaaaatcttacaacaggaaatttcgttgtaagaaatgttgacttcttgagtgtagaagtgtcaaacttgggaacgtgaccaataaaaaattgacgtttcgctacaagactaaaaatcatgggccttgggccgaaacatgaaacctaaaaagactgttatcacataaaaagcccaataaagaagactttactagggtttcatcgttttaacttcttaaaaaggttagtcgcctcttcttcgtattttttgcctcgctgagcagctgcgaatctcacgacttcaagatggttagtctcgctctctcgcaaatttttaatctttgttacaatcgtttgttagtttcgcctgtttggattgattaaagagtttgatttgttgttagttagatatcgaaacgaaattagtgattttgatttgtgttggaaaaatgaaatgtaacagccgtcgcacaagtcgtttatgattaagaagaagttgggaaagaagatgagacagaacaggcctattcctcactggattcgtcttcgtaccgacaacaccatcaggttcgactattcttgtttttttttgtctattgtttattccctgatctatcaaattgaagatatatttagttgtgttagttgatcgatttagttctaaaactgatttcattgtgtggttaatttcaggtacaatgccaagcgcaggcactggcgtagaaccaagctcggattctaagtgataagccttctaaaagagtcttctttatctgtttggtttagcatttcctcaagtcttctttttgttttaagttatgacattttcatatttctgtaagacttttactctattatgattcatgttaccaaattttcttcgtattgggagttgtttcttaacatttgtgtgatttgactattgaagtatctcttggtttgcttccatgtagagttgtttcttaagaattttttctcgcaacctagaatctggattgggtttaaatttaatcatctacttgcgaactagaagctttagaatttcttgctagtaattgtactggttttaatatctagtggttttgaatcttttgataatgtgatagtgagtcgatgcttcttatagcagacaatgtggaattgcactggtattaagatagatcacactgtacaatctgatcatttctgttgtaactcttccggtcaagtatagttgtgaaattatgtaaaatacaatcgtaacaagttcttctataactcgatgggagtctcccaatacaacaaggcctgtcaaacacgatcaaatcaaaagtttccttgaaaattgtctagcaatcatagtgtgatgctagcttattaatttagccatctggtttcaatcaaagatcaagaagaagctaaaaagggtatataaaactgtttcttattgtcatctactgagatggaagctcagcttacgttatggtatgagtcgatgatcgcatcagcaagatactcgcatttggccagagataatccggccaatgatatcctcccgtctttagtcatatacacatgccatttgtccgtcatgttatcgctctgctcgttaccaaaagaaaacagcacaaacttcaaaccacaagtctaaacaaggccaaagggaatctgtgtagtattaaaattgttggcatacctgagctttgtttaggccggtgaaagagaacatgccaatttgcttcagaatgaaggaccagtccttcccgctcttgtcttttgaaacgaggctatcatacagctcttgtctaaccgtctttattcttcctgccatcatttccatctctgctttccattcactgaacatagttacatcacccactacattggccacgattctcgccccatgaactggtggattcgagtacataggccgagcaatccttttcaactggctcttgaccctgaaagcaagtagtgttactggtaaaggttccataaaacctgtagctagatatggttcgtgacggtaaagatagaaactgagactccaggatcacttgcaacaggctcatgataagaaaatttagagtaagttttaccttgtagcagcatcagctgaggagcacacgacattgattgccccaattctttctgcatacaaacctaaatttttactatatgactgagcaacaaaaaactccattccccgctcagcaaataatctcacagatgctgcatcttcatcaaggcttccactagcaaagccctggaaaataggtgcatgtagcgttacataatatggtttcgcttacttctctcggaaacacgatattcggaaatgtaggaatagggggatacctggtatgcaacatcgaaaaatgggatatggttcttttcctgaatgacatcagcaatttttacccactgttctggtgttgggtcaattccagttgggttgtgagcacatccgtgaagcaagatgaaggatccttctggagcttcctgtacattttacataacagaaattcaagattaaccattataatccatcagggtttcacgttgtctttaaacaagtactcgttttatcacacagacagtataactgcaaacaaatactcactttggcatcacataaatgatatcctgtttgttgatgcatatataaagcaatgtcaactaaaacatagccttctaggacaaacaaacctttatatctgctatcattccctcaaaatccaaaccaattgtttttggatcatagtagcggtattcggaccacggaactttggcatcattgaagatattcttgtgattacctgatgtggtattttgtcagttgataaaggcggttaaatatgaaaccaaatcactcaaaaatgtttgtggtcaagacaatgtaccccaggttggtgatgagatcacaacttttgctccagggaaataacgctctataagagccgctgctaatcgcagtgaacctgttcccgaaagaccctgaattgttgctacctggtgatttagagccaaggtaaatggattagctcagaaacaggaacatcatgagaaaacattttaataacatgatgaacaaaagatgcagaattactctttgttccttaataacaggatgaccagctccaaatagcaactcagcagtagccttgttgaatgctgccaacccctcaattggaagatactgcaagttccatccatgtgaggtataatttagtgatattctgatgatgtaatcgcttgcacaatttgaaataaaccaagttacctctttgttatctcctctctccaacatcaaattctccgcctagaaacgacaagtaatgaaattaactacatgaaaagagccatacgagattaactagagttacaagttccaacctttttaacaacattaagcacataaggctggagttcctcagtacgataagcaccaacaccaagattgagtttcatcccgttagtgtcagctttgaatgcttcactgactccaagaatagggtctggtggagccatagttataccctcgaaacgagaaggcttcactgcaaccgtcatagtcactctgctaaaagactgaaaccaaaatccacaaatttcagatacaaactacacttattagactaataacactctaaaacgtcattcaaaattgttcatatggttcagattcgagcactaacaaagaaaagagagtacctttgcttttaggaacgggttcgaagcagaagttccaagctttagcttatcctgttcaagtttaatcgaaaacaaaaaagtaagattttgaataaactgatgcgtaatttctaccatatactcgatagaacggcgaaaagtaccttgttaatctcgcgcggtaacagagaagtggaaccgagagataacattaaagaagccatggaatcgctatggagcacaaaattaactgcacagatctcaaatcagtgaactagtgcgaggataagcaattccaaaaataagacaatgatgtgatccacaaaatatgatcacgagactttgtgagtattttagcagagctgatttgtcacctggacttggttagaatcgcgcggtttcgataacgatcagatcgagagattgaagaaaaagattaacaaggattcaacgagagagagacacgacgatgtctacgaagttgttctcacttctcaggcttgtcttgataggggtaagatagtcatttaggattatgtttaaaagttgaaagagtggatggatggatactagtggattgtgattagtggttcatgcaacaattaattgaatatttacacttagtgacaacacaatttatatattaatcaatttacaaatacaataatgacaagtgaatacccttctgtcctcacatttttcacccccaaattaaattactcaaagcaatcagagatcaaactgtaaaattcaaaaaaagaagcaaaaaatattattttcttaaatcaagacgatgatggtattaaccggagagtccctcctagctctaccggaaccaatggaactagtgagtgaagaacatcggttatcaacggtcgataactcggttctggttgtacacaaagcactgccacggctgccacctgaacaatttatttccggttttatttacgtttcaacacaaaaaatatgtaaccaatcggatttttaagcctaaacacaaagacaaaagatgacgcaaacctggtataagtgcttatgatccattgtatctttgataaccggatccacgattttcggaagctttgatctatccgtaagttggggcattgcctgcaaatttttcgaaacggtacactcattaaccaatgctatctgattcatgtattgatggcaataacgtcaacacaaaccggacttacccaagtgacaagagattgacactgaaccgaactcaatttctcaaccggccgtcttcctaacaagagttcaagtaaaaccacaccaaacgcataaacatcactcttatccgtcaattttcctgagggacataaagatgttgcaatgagacaaactcaataaaccggtttagcgacccaacaactaccatctctaatcaaataatgatttctatgtgtgattagttgaaataatacatcaacaaacaaaatgatttgatttagaacaacaattttagacgtaatgaaagaaacttaatgttatggggtcacatgattatgactatcaaactatgtgctataactctagtgatatgacaacgagtcaaagtcgatcaatatagagggaaatgttaatattttaccatctaggagatattctggagcaacataaccaagtgttcctgatagtttaatgttgtttttgccgtgagcccccaccattaccgcaagaccaaaatccgaaatctgaatgttgatctatcgttagagatggaactaaagacaaatgaatgaaatgattcttgaatcaacgaaacaaatcttgttcggttagctcagaacagaatcatcattaatgattcaagttgtttaccttggcgttgaaggaagaatcaaggagaatatttgacgatttaagatctctgtggataaccggaggacgacaacgctcgtggagatactcaacagctctatttccaaaccaacataagaaaacggtttacctaaaccgaaattaatcaaccggtagagaggattgttaaatgtgggcacttgagtgtagtaccttgctgtatcaagagcaatcttcatccgcatgtgccatgttaaagccgatccccgagaaggtccttaaccattaatgatgcaaacattaaattttatcaaaacaaaaattatttatttcatgtgggcacatgatttgttttatctctgttatactatagtattaatttaactcatgatctattacacgatgatgagaagatgttttgagctatttttaccgtgtaactgtgtatccaatgatccgctttccatcagctcgtagacgataaaactcgaactgagttcatttccatatccaaacaatgagatgatgttcgggtggtgaatcttgctcaacaaatcaacttcattctgagatttagatgataaaatcagatatcaagaatccggtaaaaaagtaaaaatgattagtacttgtgttttgttttggtacctgaaattctcgttttgcttcttgactaacgttttcgatctttttgactgctgctagagtgttgttgcctaaacaggccttgtaaacatctccgaacccgcctcgtcctataagattaccgtctttgaaaccgcctgttgctttctctagtgtcttgtaatcgaaggactgcacaaagcccttcttggataatgaaatcctactctcaccttcttccgcatgaaaccatttagatatcaaaacagagagatcacaatgaagaaactgatacagaatcttgttacaaatgtaaagttttgcagatttgttctcattcttaatgttaagatgattattacctgagttcttggtgtttttgggagatttcttagaccaataaacccaaaagcataaacaagatacaagtattagtcctagagaagatgaggtgattatgagagcgattagaagtttcttgtgtgcatctaacttgtgttcttggcctttgcccatgtggatccctgaaatcagaaatcaaacgcttgagctaatcttctcactgtatctaatttctgaattatcccaaagggatctagatgagaaggaattttcagaataactgataaagagatacgtagaagatagcaattcactcattcagcagctcaaaaatagcaattacgtatataattaaaagtcagattttcattggtttactaaaacacagatcaatccacaaaaaaaaacataagcatggatagaggaagagagagatacctggagaaaaggaagccatggaagtgtaaacaggagaaagagaaggctgtgaagcaggtgaagtaaaagcagaaacactaatgatgaattcaagaacagagaccttaagaagaagaagaagaagatgaagaatctttcccatttctccagactctttgggatttttaatggtgaaagagagattttctaagagcagtgtgagaatgtgagattgctcttccaagattaatctctctctcgctctctctttctctaatggagatctctttcataaaattttgtttccttttttcttgtctgcataaaggagggaagcagaaagtgggttttaaaaaagtcgaaatcattctctctaacttctttatcatcaaatcaacatgtgagagggtttgaatgtgatagtgaacacaaattattaaattcttcctaaccaaaaacagtttaaagtgatcaatgtatgaatttcttatattttaaattagaacaatttattcaaaacacgaatttgtaacttgggccactactaaaacttctgaagaataaaatttagagtggtcaagttaaaatatgcctttgtaacttgaagagtttactttactgacagcaaaagttgaccagttgtgtcaaaccgacagaaataagaagactttccgttttgttttttctctttggtcaattatgttatcaataaaatatcttcttagtagtatatttttattctagcatataatcctcttaaggattcacgagaatggatctaactaattctatgcagcatttgcaactagagtctatataaataaacaacaaaaacttctacacttttagaaactcaacgggcactaacataaagtattagcaaactaaacgcaacgacggttgtgaatgaaagactttcgcaaatgtataatgagtgtgattaaagtgaaattatatgctctcttttatcaaatgaaagaaccaatcaatacttcggtaatgtatgtaaaattggtgtcgatacatatacagtatatctacacattatataggagtcagtgattcgtgatatattaactagagttgcatcatcagatagttatttttatattgtcaactactattttatgcttgtaaaaatacacagagatggttcttggttacaacaaggaatatttcatatgtgaaatctgaaaggcaacaatattagactaatatagcaaataacatgatatcaacgtatgggagtgtaaatgtctgaatgttccatttgagaaatgtcctcatcatgtgacacaagtttattaggctactcaagttagcttagaattaagaagctagaacatgtgaaaataaatagaaaacaaaaaagaggaaacaaaaactaataacagaacgagaagttgaaaccttttggatccaattaaatgaatatcgatgtaattccaaaatgttagttcatgtgttaatgtttgaagatctagtacatatgaataacatttgaaatcatttttgtttcatgcaattacataactacaagggttttcatcacatattgctaattaattttgagtttagaatccaaaacatttaaccgaaaatctaataattttaaaaagggtgatttactcatctataagactaactaaaaaaatacgtactaaattatttacaagagacaattgataactagagtatgaattagttgtttagacttacccatgtgtcaaagtcatattgacaaatggctcggttataactgatttatataccaataattgcatacaagtttgtttcttaaataaatcaagcaatattcataagattgcatgtgtattttctgcgaaactattagtacgaattcgtggatatgcaaatttaatgactatgcaaagtaggtgagaatgtaatagcgattagaatagctagggtttagcctaccaaccatggtaatccagtttcctaattatcgttagtttttgaatcccattcatgcttttatctatttttcaaccaatcatgtctttttaccaacaaagcatttccagtctaagcaatatggtaggtaactcggtacgataaacagaaagataatttattattcatctataaacgaataattggttctcacattactcatacagaggaaaaaaagggatatacaaaccctctctaaattatatagttttgaattcactgttgtttatcaacaacatatataactctcttacccaattcttattattgttcatacttcatagacattaacatgtacgtatagtgattgctacaatgaatggtatgtacagatattgagacagacagtagaaagggatgaatcgagtatttattaaagagaaaggaaagggccaatctatgcctagtttcaattatgaaactcaacccatgaactgatttaaatactttacctatcggataagacttttaagggtctaaaatattttccaactatttttcatttgcaacaaaccttaaagtaatatgctaaagagatcttttccaaaggtggaatgatttttttgatctaaaacggcccatcaaccaatcttcggtccattatcctgacatgattatttgggctacatttttttaagtcttttgcagtaaattgttgaaccaacaaaaataaagagttggagttggacctagtagctgatctgctgatgtgttggtgatggtcgtcgtgggttcctgtcttataaccctagaaaccaagccacttcatcattctcaaattcaatgctttactaaataatattattatcgaaatcaaaatactaatttagacgtatataaatctagaagcaaaccttaggtgaggtcgaaacagagatgaccttttgcgtgcactttaattaatatcttattacataaaatgtcacactttgagtaaactttacattattctctcatccataataaataaataaagcatactgggttttaggtcaggctgacgtcagcagtttctttgtgtttcattttttttttttttgtaatctaacgctccagatttgttgtcttctccacgagccctttgttgttgttggtaatggagattttcgctctaagtcattgtggcttcttcttctttatttagaaaccaattcatcaactccttcgttatttctaaatctctttgccactacctcttgttgctgcaattgaattggctcaaatcttcttcacttggtcgacgtaaagacgactttgacttggtttttaacttcacttctccgtcgaaaactatcccttctcttccgatcgaatcaatcggctctctctccacacaaaccaaggtaagggttaaccctctccggtgattatgctctgataaatttacttgctcggccattagtgttcagaaacttggtgatttatgcatgtttttttttgttcaaagaccgtagatttcggaattaggattgtaaaaattgaacctttacatcagtgtttttacaaagttataagctttacttggaaatcagtggttttttgggtcaaccaaagttgaaagatttgaagaagaatgaaactagttcgatttatatatcattttattgcttcttaagaaagtgtcgtccttggttctttatgaatttccaattgcagccaaatatgtcatgttattcacctaatttttgtattttccaattgcagccaaatatcttctcctgttactggagacaaacctgcatacatttctgtcatctctgttaaggtattacatttagtttacttgtttacttaatgtagctgcttattacatttttttcttcaagtctatattcttctttcaatagcattaaaagttatgtgtatcctcagattagatcttgctgactcgcaagtttttggattatttagcggtttaataagaattatatcttccttgaaattgtgcctaggtagtggaatcgttgttagcctactgtagctcagataggtgatggatcatttccgttcaattgaataatttgactatttaaggtttgcacttagttttgtctacagaatcaattcatcctttttcacagtcaagatattattctcattatcactattgtagacttcttggacttccatacattcatcagtcaacttttcgatggtgcgtttttatcacagtggcacaattatttaagaggctccatctccactgcaccactgagaagtttcgtgtggacatgtctaagcttagaattggtttggttgaaaactgaggagatggaagtgactcgtggtttctcttttttggacaagtttcttcgaaaggtctgttgattttctttgtctcttgtgaactttaatttcgtttttttttccttaggatgcaatgatatcttatctttagatgtcaatatcaaatgtccttaactattcattcatttacggattttgattactttataacagttggtatcttcttctatatatcgtcatcttatatgtttttatttgtatatagtctttcacagaaggagcgtattgagtttctcgacaatatatttgacatcttcttctgccttttctggtaagtgtttaacttttctgataccaattagttttcttaatcattgcatatttttaatgcttgtgcctttattaaagaggaaagttgcggtggattaaagcaccatcgtgcggagaatacgataaggctcttgcttcatttgaagttattgacagttgaatcgagccgctcaattggtcaattatggagtcaataaaggtttgcatgaacgcactgtgcggagcggcctctacgtcgggcgagtggaaaaaaggctggcctatgcgatccggtgatttagcttctctctgcgataagtgtgggtaagggccttcactcttgtgtctaatttgaatacttttgcgaccagttcgatattcgcaacacttctgcgatagattagtgctgtgggtttgcttacaattagaacaagagtgggtacgtgaagggaatctatatttcatgattacttattagtaaactctgtgaatgttggtttttgataggtgtgcatacgagcaatccatattctgtgaagtgttccatgccaaggaatctggttggagagagtgtaattcatgtgacaaggtgacgaaaatccatggcttactacacatgtttttgcactcaacgtatttcaattgttttccttaatacgtatttacgtttttttcagcgtcttcactgtggatgcattgcttctagatttatgatggagcttctagagaatggtggtgttacctgtataagttgcgccaagaaatccggactaatttctgtaagacaatttcctctccatgagttaacttcttgcaagggatgcttccttggtcttggtttctctgtcactatactcatgtaatctctcttacagatgaatgtgagccatgaatctaacggtaaggacttcccctcatttgcttcagcagagcatgtaggcagtgttcttgagaggacaaatctcaagcacttgcttcactttcaaagaatcgaccccactcattcttctcttcaaatgaaacaagaagaatcgctgcttccttccagcctagatgctcttagacacaaaactgaaaggaaagaattgtctgcacagccaaacttgagcatttcacttggacctacgcttatgacaagcccatttcatgatgctgctgttgatgacagaagtaagactaattcgattttccaactggcccctcggtccaggcagctgcttccaaaacctgcaaattcagctcccattgctgctggcatggagcctagtgggagcctggtgtcacagattcatgtcgctcggcctcctccagaaggtcgcgggaagacccaattgcttccccgttactggcctaggattactgaccaagagctgctgcaattatctggacagtatcctcatctgtatgttataatatcgtgtttctgcttttattctaccattatgcactatttttctgtgctaaggagtccttgactgtttattttcctagctcaaattccaaaattataccactctttgaaaaagttctgagtgcgagcgatgcgggtcgtattggtcgactggttcttccgaaagcatgtgcagaggtaacttgtttctctgtacgcttatttgatattcccaaactattgctatctaaatgccaggtatcagctataaccgtctatgcttctatgtaggcatatttcccccctatatctctacccgagggtctcccgttaaagatacaagacataaaagggaaagaatgggtgttccagttcaggttttggcctaataataacagcaggatgtacgttttggagggtgtgactccttgcatacagtccatgcagttgcaagctggtgacactggtacttttcaaatccttttgtttcgttaactacattcataacatattgataaacccaccctggtatggataaatgaaacattggcactaaagcgttccaatcatgaggacagtgaaatacattccacgaagagatgaccgtacttttctattaggtctgatgtcttggattttccatgttctctgcagtaacattcagccgtacagaacctgaaggaaaactcgtaatgggataccgtaaagcgacgaactctacagcgacacaggtaaatgcataataagctgagagttgcccccttaggcataagtaactgccactgtgaagtgtattgaattaaagaatccttttctggtgctctcgtactgattctttcagtgaaatatttttccgtgtttcttcagatgttcaagggaagcagtgaacccaatctgaacatgttttccaacagcttgaatccgggatgtggtgacatcaattggtctaaactagagaagtctgaggacatggcaaaggataacttatttcttcagtcgtccttaacttctgctaggaaacgggttcggaacattgggactaagagcaagcgtctgctcattgatagcgtagatgttctggaactgaaaataacttgggaggaggcacaggagctgttgcggcctccccaatccaccaaacccagcatctttacgctggaaaatcaagattttgaagaatatgacgtgagttactgttaactgtttagttatcaaaaacagctgggaacttttcactgtattttctgaaatcatgtatttgctgctacccaggaaccaccagttttcgggaagaggaccctttttgtctcacgtcaaacagggtgaggcctcatgtactatgtaatgataggatcagaagaattaagcacccttggaatgatcgaaagatttgaagtaatgaacatctgattatttggttctgatatgtgatccatgaattctcagggaacaagagcaatgggtgcagtgtgatgcttgtgggaaatggcgacagctgccggtggatattcttcttccaccaaagtggtcgtgctctgataatctcttggatcctggcaggtaaacgaggttgcatgttcatgtgtttaacctaggctagttaccacagaacattgcgcatttttttccgaaataacttagactacacatatgggataattatagatttttgactcactgagactggccatctgaataatttgagttgctgtttatatcgtcaggtcttcatgttccgcacctgatgaactctctccaagagaacaggatacacttgtccggcagagcaaaggtaaaatccgcagctattattggtctgtataattagaaacttccttctttacataacgaaactttcgtctcaacagagttcaaaaggaggagactggcatcatcaaacgaaaagctaaaccagtcgcaggatgcatctgctctgaatagtttaggaaatgcaggcatcaccacaaccggtgaacagggggaaatcacggttgcagccacgaccaagcatccaagacaccgggcagggtgttcgtgcatcgtctgcagccaaccaccgagcggaaaaggcaaacacaagccgtcatgcacttgcactgtgtgcgaggcagtgaagagacgattcaggacgctcatgctgcggaagcggaacaaaggagaggcaggacaggcaagccagcaggcgcagtcacagtcagagtgcagggacgagacagaagtggagagcattccagcggttgaactagccgcaggggaaaacatcgacttgaactcagacccgggggcttcccgagtaagcatgatgaggcttctccaagctgcagcgtttcctctggaagcatatctgaaacaaaaggctatttccaatacagcaggagaacagcaaagcagtgatatggtcagcacagaacacggttcgtcctcagccgcacaagaaactgagaaagacacaacaaatggagctcatgatcctgtgaactaaacagctttggaattc

SEQ ID NO: 655 - DNA, 96585 bp, Arabidopsis thaliana
gaattccagtttgttgatgcctatagaagcatcaagcaaaggtaaaagatagtcttatctctcccctgctttgagttgctcttatgctctctctttcttcgaaattgatagggagaacgaggcatcacttgctgttttacctgatttacttgaggagcttgattcgatgagcgaggtctgtgacctttaaccttcctctctttgtaggtttatggtttgctactaaacgtttcagtgctatacatgagacaacttttcttacttggtgtttcaattgtgctcggatttttcaggaggcaaggttgcttacacttatagaaggtgttcttgctgcaaacatatttgactggggatctcgagcatgtgtggatctatatcacaaaggaaccattattgaaatatacagaatgagtcgcaacaagatgcagagaccgtggagggtgagagacaagaccaccctttttccccgctgaggttactttttcctaactgttaatttgaagctggaaatcttttttggtccgtaaaatcaggtagacgattttgatgctttcaaagaaaggatgcttggatctggaggtaagcagcctcatcgacataaaagagcattactttttgttgataactcgggagcagatgtcattcttgggatgcttcctcttgctcgagagtttctccgtcgagggactgaagtacgtgtctctctctagctcttcctatagtaatcttctcttcacaaaatcaaatgcacagaccaaatgatttcattgtgaaattagttgaggaaacactaaacaaaatgttattatgattccccaggttgttctagtggcaaactctcttcctgctcttaacgacgtgaccgctatggaactgcctgatatagtcgctggggctgctaaggtttaactttcgattctgtgcagtgtttatgatgttctttcatgtaactaactcttttgttcggtctttactcttgaagcactgtgacatcttgaggagagcggcagaaatgggaggcttacttgtggatgcgatggtaaatccaggggatggatcaaagaaggattcaacgtcagcaccattgatggttgttgaaaatggatgtggaagtccttgtatcgacctcagacaagtcagctctgagcttgcagccgctgccaaagacgctgatcttgtatctacaaaaccttctctgttttctacctgacataaacttcaaacacatcaaaaaagagaagctttgttctttatttgatgtttaacaatattgcaggttgtcttggaaggtatgggaagagcacttcacaccaacttcaacgctcaattccaatgcgaggctctcaaggtttaaacctcacttgacagaaaatttcagctctagaactgttattgaaacttttggctgaaaccttctcttcctttttggcagctagcaatggttaaaaatcagagattggctgagaagttgataaaaggaaacatatatgattgtgtatgcagatacgagcctccctcgctttaacaatgttatgtatcatttcttcaacctttagactactgttgtatacagattaagcattcgtcatgtggcatatgtatttttatttagactacacttttactgtataaaattgtatttgaatgaatcaaaatcacttgctataaagagcatcatgagggttcagttacatttcaagaacaataacgtttagtctgaaattatcgcgagcaatttctcaaccatgattctctgctgagtcccacttagagattccgagttcattattgcattggccacgataatgactatacgtggagctgtcgcatttacccaaactctgccatttaagcccacagctatctcgaacgagagtttctttccaagagcctcaatgaccgggcgcgttggtgaattcaacagcctataagagatgagaaagtaaagttgtaatggcgaaagaagatagataaagtataaggagacattttttatgaggaagtatatctcacattcttgaaagaccagttgaagtttcaaacatgaaaccatctctcaagggtccaaataatgcagctttcccactagctaatacatagaaacaagagacaattagtttaaaagggattaagagaagcagcactgttttagcctccaaagcttttaacttaccctcggtacaagacagctccggattcattcctatgtttgtcttgacaacccggagataaagcagagtgcctacctgtttagtacacaaaaatttgaacattccagaaacaatcaattcatagagaatgtcatatcccaaatgagaattcaagagagcttcctgagtcatcagaatgtacatgcctcaaacttgggaatatttcttcgtgttcctccttcgaatgcaagaactggcaaaagtgctaattgaggtcctttaatgtccacccaaaaattctgcaatgacatgatgagtaaaagaaacaattcagtacttactaaggcgatgttagttcatgcaagaaagcttaactgcagctgataatttaaaagtcaattaacatttgtttgtccaataatggtatcagttttcttctgattttagaccataacttcaatactcccacctatttatttactgatccaagaccatcaacaaacaagttcacctttattggctcagagaaatgaggactgaagtcgcggaaactgacaaacatatatttgtatcgtatttgacaactaaagtataataaaatgctttcagagatgaccagtctgagagggatccaaaaacaacacaagaatctatacaagcaatgatttcaaaggacttacatctgccctagaatcgaccacgattccaagaacatgatcatcagggcgaggtatatactgcaaaaaaaaaacataataacagagtcagcaacaaagagaacgagacttacatagataattaacaaaacaatattctactagagttttgaaaaccaaaaatggtaaattgtcttatcaagccagatgtatatgatcaaataactagggagaaaactagcaagaatgatccacaaaagcatcaaattgtcaaaatgctacaaaaggcaaatcttcaattcttcatgatgcaattgtgccaggttatttgttacttttctactcatgattaatcaagtggacctagtatccgagcagatgacacagttataatccacaagaagctcaatagagaagcaaccagaaagggaagattagtaagaccactgagctcacccgtttatgagaactttcgagccaatacttattaggcttggagtaacttaatttgccagctctcatggcagagatagcatcattatcctaaaataagccaaaaaaacaaacacatgtcaatctacaattcctttttagttgcaattgtatatcacaaatcaagtgcccactggaataattgttaggattcaaacaacacataagaaagagaagaagatgaaacctgaagaaggccacttccgagcttgattgtttggttattcatgtttgacaaatcaagaacaacatcacctggaacctaaaaattgaaaacaccatgcttcattgtaaccaaatcgaatcgaaatcataaaaaagccaactttttagagatatacggaccacaatctgatttaagaggcttgtgggagagacagaaactttggcagccatgagtgaggtgggttttggagataagaaccctaatatatgttaaactctgttaaagcttgttccttgacgacgatgagaacccagaaaggaacaacactgcacagtctcttcttttttttgcacgcaaattttgaaccaaaactataccgaaccagtcaatattaggatttcggtttacttaaaccgtaaaactaaaaaaaaaaactaagaaccaaatcaaaaccaaaccaaaatgatttttttatttaatacatgaataatttcaagcagaacatctcttagtaacagtgatttgaagaccatgtttcattgacaatataaaaccaagagctggcacaatcttctgtccttggagaaccttaatgtcgtagtttcgtaatatctccactgccactatcttcatttgagtcatagctagatgtttacctagacaagttcttggaccggcattaaacgacaaaaacttgaaggaaggctcatgttttatgcctccattctccgaaatccatctctctggcttgaactgcgatgcatcttctccccaaaccgctcgcatcctccccaatgcataaagacagataataatcttagagtttgcatcaactttatggccacttggaagcacatctgatttgattggagacttgcgtccgaaggaaactggtgggtagagtctcattgcttcacacaacgcaccatgtaaatacaccaacttgtctacattctcttggctatttcctgttcttgatagatcagtgttgatgttgatctcttgatgaatcttggctaccacatgtggattttcagagagaagccagaagaaccaagagagagcggtggctgttgtgtctcttcccgctagaatgaaagctaagatgttgtctctaaggaacttatcgtcactcggattcaagagcttgtacttggtcgtgtctagctttatgaaggaagttaaaagatcctgacttcctccattggaagtcccttgtgatcttttaatctcttctctcttggctgatatgtatttggcacacacgcggtcaaaagttgcattagcttcagtgagcttcttctcttgtccgaatcctatccagttttgcagcttccacaagaaccttggtttaaaatgcctataaagaatcccttctccaacatcgtcgagagctttagcaaattcgtcttcaggcatttcaatggagagagatctaggatcagaaccagttacaaggatgaaaattgtatcgaaagtgaacctcccgaagacgctttgcaagtcaagagttgttccttcctcagcaaaatgattaagaaggggaacaagaccgtacttgagtttacttgtcatggtactcattgaaaacctttgaaactcttgactatggagcatggcttgataagatttcctcatattcttccatagctccgagtccgtggtgatgaaactgtctcctaacacatcaaaaacatcttggaactccggtcctttgatgtagtttgagaaatttgagctcattatatgatgaatgttagctggatcaaccgtgagcaacatatccattcctgtgaaccgcggtcctttgaatggaaaggtcaagtcagaggtttcgagaatcttcacgctgtagtcgtagattcggtgaagcgccttgagcatagcgggtagcatccggagaaccggccagttcctagggtaccggccatgaggtttcttgaagagaaagtaatgaaggatgagaaagcaaaggatagctacggaaacttgaagtaagcttattgaagccattggagtaaggcaattgataacacacagtttgctgacacaatgagaactaaatttataagcatacacttcagggcacaagtaaggagatgctttttaaaatacacactaaatttcgttatatgcacaaactgcaaagcacgtttaatgcatgtatatcatcaaattagaaacttgtattaaattgccaatgacacctaactttttatttttgtgataatacacctaagtgtttcaataatttgaaaactgttataattgccccttgtaactttatcaactaatcaaaacttattgaaaccattagagaatgagctggattcacgcacatagacttttgagtgtgctctatgagcgctaaaggaaatgtcattaacttcttcatcctgtccaaagatgatgataaaggtttttagcatttaatattctctatctagtttcagttttcttccctcaaaattgcttgctataaagaaatgtctgaaatacctggagaaagaagccacaaattctgcttcaagaaagaaacatgctttatacttgaggacaatgatgatcaattgacacaatttgtataacctaaatccttacaattccaactttgtttgcaagaactgagttcggatcacaataaatatatgcaacagagtgcaatacaattatacaacaaacatacttaatacacatctttttgccttatgtactctcaaaagggtggtgtcacgtgtgtgtatatatatcgattacacaacactcagcttcaactaatttgctcctccaagagaccaaccgttttgtattataaagcgaccagtcctttgcttatagagaaaaaaaaatggcagtctattctcaggtcaaagcgactattattattattacctatctcttcaatgtttctcttgatgcttcatctttctcatcactattttcctcattcacatcttcagtggtctttacgtctttttggagagcacggagcattgcagagttcacctgttttctcaatttcgcattctcaacaaaaatgtttgccagtatcttcctcagctcgtcctccataattcttgtttcagtatccatgctgagagttttatcgatgtcttcagcagcagcattttcgtcaaacccagaaagtagctgagcctgaaaatggtctaaatcgttaaaacttgtaaaatgcacaacgttacagttttcattagtgcagcggaaacctaactatcctacactaataagtaataaataacttcatcctgatggacatatcgtgaaaagtaactcttattagaggaaactgattttaaatggcaataaagcagtgatgcagcaatacctcctcaatttgatcatcagatattgacagtaaacgcaaaacgtctgatattgtagttgagtcgtcgacaaagttaccgtttccatccattgacaaatttaagttgtactctttaagccggtcgtggagaattctgcagtcactaagcagcttctttctagccgcaactgtgttctctagtagttttctttcctcttggaggagtttctgaaagtgtaacatgttccagtctcagttgtgttgtctcttacgtgcatgataaaaatccacaatcccaaggtgctgccaaataagaggatataataatactatacgcagaaattacctcggcattagttttatctgtcaaagagtgggttagctctttttctaattccacatgagaacgcctcagagatttgacctctttgacaagaactttcatatctgcttttgattttgcctctaattcttcatatcgcctagagaggtcctctagttgttgttttctggcgtccaactctttcgacaaaacatgtttctcagaaatagttgactgtacagtgggttctgcatgtgagctcccatcctattgaaataatttgcatcagtatgtttctctagaagagagaaattatgtgcgatctatgcgaagcagtttggttgcaaaactacttttaaatcatacctctctagattttaacttcatttccatctcgtaagatttttgcctaagttcttccatatcccactgcatctgattaaatctttccctctcactcataatagcttgctccaagttctctttgcttctctgcttcgtagtttcaagttccccttctagatcattaacctgagcagtaaaaccaacattacaacactaccattcgctccaaaggaaaaaaggataagatatcaaaaatgagagaaaaaaaaaaacagaattcatgactacttttttttattgtacctttttgttcaggtaatctttcacagcaatctcttgatttagccgtgctataagatcctccatatctgtttttgcattgacaagtctctcatttgtggctaacagaatcctgttcaatttattacgcagctccagtggaagaactatttgtgcactaccctgcctctccgggttacaaacaagcccagttccaagcgatacaccaggaccttggcgtagatccaggtggctatccctgcttgaaattaagagaccagatgttgatgtctgaccggtgtgtaaagcaaacctttcagcactatcatttctgtcatgcattactgagtgagttgatggttctggttcagagagaagtcgtgaaccattgttagcaagaaatacgccttttgaagcatttccattatacacatccttccctaggatattattgacatatcttgagcggactttatgtttgggaaagtcttcaagttgctctagaattgtttcgctcattgaaagcccctcgtcaatgttggacatgctaaagttaacgagcttctctattggatttgttaaagttaaatcttcatccagagttagatcttccgtaccaatttcagaaatatcatcctgtcctacacttggtgatccaacctcagatgtttcataagcagtatcactgccatagtcagatgtgagagtactgccaccagcatgaaacaagctcaaacttgggtgaaccataggcgacgaacttgtgctacttctatcattattggaatcagaagcattctgatctacatcttggcatgctgaaaagcaatatcatgttagactctaatcacacattacagcattgaccaatgcacggcttaagtgtatactgtaatatctcataccagacctagcagcagcttctagttcaagaaaggatgcaactacgacacttcttgccaattctatatcagataatagctttgttatccactcctcaagagagcaccttctctgcaacaagatcaaagctatcacttatgaaacaaatagtttgcacgaataattgtaacattattgttgggacatgctttccgtatattaatccacctgaagtctaccactaatctgcataattcgtacttaatcttggttggacaagatttggagaaaggggaaataatagcactaaatagaaatatattgaaagtaacagcagttacacaagtgacctcattcagttagcctcaagaaaaaatgcatacctcttctaacactgctctgcttttcatacgcaacagccctttggggggagctgatgggaaaccttttctaggaaatgttcttttaagctgtaaggaaaacatgagtgtgcatatgctgtcaatcacattgcatttaaaacatgaagaaaaaatgaagagttagatcggcctatattcagggagaacaaaatcttacatccgttaatagctttagaaaatcattaaatcgtctcaacactcctcgcattgtggtaataccttcaggggattgcacacttacctgaaccctgtaaaactgttcatctaaaatgttatatatgtaagcaagttcaactatattggaataacgtatgacatgcacagcaataaaactcttcagcagcaaaaaaacaaaaaaaggcacactccgctagataattaagttagtccaggaacacaaatatatcactgttgatgttgaattttattgatccgcagacgttcaagatatggttgacataaccagttcagctaatttgctacaagtcgataaacattgaaatgctcttgcaagagataaacactgaagaattcaattaccacaacaggatctgaatttcttgattttggaaggacaatccacgagggtattgtaacgcaataactccatccagttcgagggtcatgaggccaaacagtatctctaccattctgcagaaataaacataaatatctcaaaatctccaacttgtacatatatggaattcaatcgagtagaatgatactttatagtctggagctatccaaagctgcataaataaagatttagctacccctgatgttaaacaaaagataaactaacaattcaatagagggcaacaacagaattcaccaattgtaggaaatgacttctaatgccttatgtggtgagtctaccattggacttgctggtaactacactagctatccccatagcttgggactaataacaaagacatccacatttatctcaagtcccattagaataaagcaggcaactgaagaattctagcacggcacttccaaaaggtaacgtggtaaagtccaataaagttcgaatttttggcaacaaaagaactcacccatttgcgcggtggaggactccaatccattcctaatggaagcggcgatgttccgtcatgcctgtgcttgggcggactccgtctctgcatcatctccaccaaactttacctaagtctctctctatctccagctctccggaatccgaatttgatattccgatcagaatcaatcggagacacgatcgagtactaatatcccgatcgagaaaccacaaattacgaaatctgagcaaaagatgatggaagagtaagcagagcgtagggtttatgaagatcgtcgtgagatcgaggagagagagagaggacacagatggaggcaaaagaaggaccagatggcgtctctcagggtcttctctgcctctgggttgaattcccacagaccacggtgattaacggcggtgttgtgacgtttactttaacggaaaagccgagaagaaacaacacgtgatttgacggaggcgcgaagcttaccgtgtatatatgtgtatatgtcccactttttcccgtgagattcggtttgggtcgtgaaccacgtcttggtttagagttgggaattgggattttatatctgttgtacattttgtaaggcttatctctggctatgtttggtttaggctcagctcattggatgtcattttcatttttctgcctttaattttccttttttttttttgtctttggctaaagttagtatattattcactcatatcttattcaaactcgaaacccaattttgacccaaatcgtttcaaaccagaaggaaatagaccgctttttggttttgtttggtacgtcactaccacactaaaaaaaaaaaaactgatttaatgatgatttgaacacatccctacattttatccttcatattcgtaaaaatttacactttaaaatcacatcttcttccacggataaattacaattattcgatctttttgctcagatttctctatttgtttgaaactgatagaatttgtttgttttctttgtatttcttataagtttgatatcaaactaatttagcgttaaccattaataatccttataaaacaattcacggtacaatattttcgaaactgaagcaaattgttttcttttcatatttatattttttacttattagaactaaattagttccgacaaaacaaaaagaactaacttagttttgcccgtgatattttgacaaaatttcattttgatccttataataatacagtattttaaaaataaatcaacgtagctatccgaaattaaatatttgtaatcagcggaggcgaaaaggtctccagctccagctaaactccaagaggagagagagagaaagagattcaattatatgcagagagaaaaagaagccaattggttctctctctctctctctctctctctgattgattgatccagcgattcgtctggctggctcggtttccgcgggaaaaccttcttcttcgttgaccttacacgagttttgttgattcggcagggggatcgacgacggagatggcgattctgtacgccctcgtggctcgtggcacggtggttctttctgagttcaccgccacctctacgaatgcgagcaccatcgccaaacagatcctcgagaaggtccctggagacaacgacagcaacgtctcctactctcaggatcgttacgtcttccacgttaaacgcaccgatggcctcaccgttctctgtatggccgaagaaaccgccggaagtacgtcctcccctttcttttacttctatggctaattttgaggaagtttccaactttggtgacagtggaattcaaaagtctaatccttttttgctctgaacgatcgctctgttattgaattcgagacctttggtcttatattgtgatgtgaatgaatttgatttttttggacataacatcaacacaattatatccgagaagctgtgcattagagagatgtgaatgtctttctaactcaaaagtcaaaacttttttatgtcagggagaattccttttgcctttttggaggatattcaccagagattcgtacggacttatggcagggctgttcatacagcactagcttatgcaatgaatgaggaattctctagagttctcagtcagcagattgactattactctaatgatcctaatgccgataggattaatcgtattaagggtgaaatgaatcaggtttgatgagtttgtcttacaagttcagtcggattgtgaagttgtttagagacatggttctgagtcttggcttcactgtttgacaatacatcctggtttttctttttggttttggataggtgcggggtgtcatgatagaaaacattgacaaagtcctagatagaggtgaacgtttggagcttcttgtcgataaaaccgccaatatgcaggggaatacattccggttcagaaagcaagctcgtcgttttagaagcaacgtctggtggagaaactgcaagctcacgtatgtttcctaaaaccttagtaaacaattttcagtattatgattgcaagactgtatactaaaactagtttttggcctaagaacacatttaactatagcaaaaagtactttaatcaccccaagttccacatttgtaatgtcaagtgagaattttttaagaatcgaacatagttcctaattcctaaccctttttgtctcttgcagggtcctcttaatactactactactggtgatcatatacattgcagtggcctttctctgccacggacctactctaccatcttgcatttaagtgcatctgtctcttaaggaatccatcccgattctgcgcgttgccacgactttttatctcctcatctgattgtaaaccttgtgttttcctgagcattttcatgtggcttaaaaagcttatgtttccaactcacgtatatgaaaaagtatacttatttatagagcaatgtaaaagctcattgctttgcgaagtgtgtgaatctttgttgacatcatgttctataaattacatacatagtggaaaagtgaacaggcttgctttgtctgatatgttcatacaactctttgaatcttcatgttctttgtttatgtgacttcctctctcgtatatccacaccaacttctgaagtcggcagttgaatgatcttgtacgtcgttgaccctacaaattcttgtcattttacaattgaagccatttgttgatcataaatcgaatgtaaatattagaaaagaaagataggagaacaagatacaacaagtgtcataaattgtcgtccgaaaataaaatatgggtatcatctctagttaaggccagacgcacctcattcaccaacttgacatcttgtcatgccacctaataatagctaaataaattatagtaggtggatttaaccttttatttatataatagcagcatttcaaatataaaattttgtttttatcaacaccatgtttactaactaaaaggatggaatttatatccatatatgatcaaaatactaaaatgtttggttgaaccaaaaaaaataaaaagcgtcgactttacggtttaaatatcgttacagaaaaagaagaaaagaaaagacggctacatcacgcttactaaaaattctacagtccaattaaagtcataacaaaattaatactatatatttattaaaaaaaacatgattatttactttccttacaaaaaaaaacaaaagtgtaaatatttcctggtctaacgctttccctctgcgtgccccgttccttccctcgcggttactcttccgttttatgtttttttttctgagatggtcaattttcccgtcgtctctgaattttccctttttctcttcttcactccaccgccttccccgaatcacttcctctgcctgatctaattcaatctccttcctagctcaaagaagtcaatttacacgagcagatctctgcactcaaaactcctggatcttcatttctgggcttcaatttagagtttttttatattaaatgggttggagatacaaagctggtctgttcttgattggcactgttgttatcatatgggtcacctccgctgaagttactcaggtattcattcattgtctcttcaattttgtttaaagctttcatcttttgaggttatggatgtttcatttggatcttattccattaggcttgttttcaatcatgttcttcgagctttgaattagcggtttgagtttgatgaatcaaatggcaaatgcaaattcagatctctgtttaaatggtttgataatttattgaatggtttgacttcaattttgaccaggatatctttacagcctataagcagccatttgcagtcacatatcttggagcttctcttatgattgtttaccttcccgttgcattcctcaaagactggctttgtcgatatttagatcgacgctcttccaaatccaataaaattcccgctttgaccgatgattcctcggttgagctcggttctcctttgaggcataaaatcattgaaatgggacttcaagggactataactaagaaagatagtgaggaacacctttcatcccatgaagaagaagatgagagacccttgatcggtaaagttagagaagaagtgcagactctgaaacagaggaaagagatcacgactaagcagattgcaatgtacggcctttacctcgcaccaatttggtttgtaacagaggtgaattttctttgatatgctcgttgtattgttttgatggtggtgcctgaaagtgtcctcttttaaaccttggtattgatatttgtttgctgtttttgatgatacagtatctgtccaatgctgctcttgctcgtacaagtgtggcaagtactactgtattgtcttcaacctcgggactgtttactctgttcattggtgtatttttgggccaagataccttgaacctgtcgaaagtagtggctgtatttgtcagcatggctggtgtggtcatgacgacgctagggaaaacttgggcttctgatgagtcgcaattaaattcttcactgtaagtttttcatcctaattcgttcaccatgcatctttttcttatatgtattcaaaagctcaccctgggctgcgttttaaattgatagctcaatttgtctcattctcatagcatttcttgattccatgagttttccagtttcatcaaccatatttttttaacgtacagttgatatttgtgtttagcaacggggaacgatcccttatgggagatctttttgggcttctctctgcggtctcttatggactttttacaggttagaaatgattaatctttaaaggtttagagtattagtgtgttggggaggataacctcattgatggcttgtacccttctgatattgacaacacagtgcttcttaagaagtttgccggtgaagaaggagaaggggttgatgtccaaaagctgtttggatacataggattatttacacttgttgctctctggtggcttggtatactaatatcttccattcatttttacaagtgtatcatccgagaaacataacatatgagacatggaaaagttgactcttattcaaaaagtttgttttttggttgtatgtttcagtgtggccattgacagcattagggatcgaaccaaagtttaccataccacactctgtgaaagttgatgaagttgtcttagccaacggtttcatcggaagtgtcctctctgactatttttggtatgttttaatgatttcagctattacaagataaagtggacccaacaagcaatgttgagtttagctacaagtgtcttgtttattgctaggctagatcctataaagaggtgtgtaattacttgtttagaaaataacttggctgttttggtgcttttgcaaccaaagggcactttctgtggtgtggacaactccgctggtagcgacactgggcatgtctctcacaattccgcttgcgatggttgctgacatgatgatccatggtcgtcattattcagccatttacattcttggctctactcaggtaactaaaacttatattccatcaacaacagagaatgaataatttttcctgatgctcaagaattagcatttggtttattttgcaggtgtttgctggattcgtaatagctaacatatcggatttgttctcaaagaagcttggattgtagcacatatgattctttttttttggttgttttgtggtatttctgggtagaaaatgtatcctagaagattcttggttggaattgaaagctaaaagggaattttccctgtttaatggatgaaagataagaatgtgattaccaacgtttttgattcccatgtgcacgtctttggaaaaagaaagtgcaaaccagagagagttgttgtctgttgagcaaagatgagtgaaagaaaaaatcaaattcatgtttgaactagctcgtatacatgaaaccgaactaataaccttgttggcatagataaaatatttttttgatctttaaaactccatcaaccaataaccttacgttgacagatatgaaaaaaattctatgttaatgttgttttattattctaaattaaaagccagtaattgataattacgattattggttcagaacgaaccttctttctgagccagaaagtttagttcgccttgttctgtctgtgtttcttcctcttcccctgaaatcgaacgatttataaaatcgtcgtctggctttcgacgatctgctgacgaagaccatggcgccgattttcagatccacttcccttatcgctttttctctcttcttcttcttctttgcttccactcttccgatctcatctgggtaatcaatcctctatctccacaaatcctctatagagcttgttgacatagagctttaattttcattcagtcgttgcttttcgtagctgcgatatctttttagcattaccctctaagtcttccctcgtagtttagtgatcttgatatcgttatctccaagttttggggtttgataataatttgtgcaacgttgatttcaatttgatctacttgtttgacgaatttactactttagctgcttatacatcccaaggatattattaaattcttgtctttgattgaattcagctgttcaattcattctttccttttcttatctgtttggttttttcaggtctgaggatagttacacgatcacgggtagagtgagggttccagcaagtaggtttcacaattcattctttgtcttttctctcgagaactcagtttttttttactcaatttttgctatgtttttggttttatcagtcaattatctgaaacctccgttcatggcactgttctaaggaaaaatacaattatctacaacttatttctattggtcaatactcaatagcagatttatagctgttatgcaacttccactatgggtgtgtttgctctgtgtaattagtatgtcttgtgatattgatgtatatttgtggcttagatagtttcagcaagtgagaagtaggtattagtaattccatgtatgaatttgctatgtagtatgccatctctataagtggtagactggctaaaagcagtgtttgcttaagaatattagcaaatacgttttgatatgtctcttgagtacttcatattattctaattacatgatacttcaaccaccgtctcgtatccattacgtaatagcctcactactcttttactgcaaactaatctaaaagttattatggcaggcaccgtgattggtcatgcagctaaattctcaaatatcaaagttatactcaacggtggacagcatgttactttcctcaggccggatggatactttaccttgtatcctactgttccttcttcaaacaatatgttcttctagttatttactcacgatatctactaattggtttcttactcatctttcaaatttgtcatctcacacatctgtagcttttggtataattttttttagatatagttgagaaaacttgacaccgtattttgttgtgagaacaatagtatcagtatttttgatcttcgttttcctttacttctctaatttcaaagccacaaagtgccagcggggactcatctgattgaagtttatgcactgggctacttcttctccccagtaagatcttttagttgcaatattctatgaactacatctattttgagaacttgcttctcatctgtcaatcaaatattttaaattaggtgcgagttgatgttagtgctcggcatcgtggcaaggttcaagcaacacttacagaaaccagaaggagtcttactgagctggttttggagccattgcgggcagagcaatactacgaggtgaatacttcatactgtatcttcttctattttgtatgtgttagttttagctatatgcgtcttcctcctgttttctgatcgatcatgtactatttgcagatgcgagaacctttctctgtaatgtcaattgtgaaaagtccaatgggtcttatggtgggattcatggtcgttgtcgtgttcttaatgcctaagttgatggaaaacataggtacacgtctctaaactcttcacttgtatccatgtattgataatgttcatcattaaaccgatttgtgggtctctccctctctagtagcaatcaatgcgacagtaaccaacctaacagtgtacctaatctactgaggattctagcagtgccttgtttttttatcatttcataaatctcttcaagctattgctgaattgaaacctagcaaattagatgtaaatggtttgatgagaattgttggtatgtgtgataaacagatcccgaggaaatgaagagcgcacaagagcagatgagaagccaaggagtgccttcactcactagcttgttacccgctagccgctaagcgttaaccaacagtccaagactcaggggttttcacttgtaccagttaaaaaatattccaggatagacttggaagaaatcagcgtcaagcaaattccccaagcgatctaacattggtttatgcaaatgttggttagtgtagagaactgttatagtgcagagacctttcagactgacctaaagagagattttatattttgattttattgatggtgaatgttttgctctttttggtatggaatgttatgaatcctttaagaaagatacacgaattctactattcatttcagaaataaatttacaaaatcaaatttcaatgcatgtatattttttaaatcaaatttcaatgaatgttagtaatgtattttaacagaaaaatcttcgtgaatatgagctctaaacctgctgtgtgaatcagagtgtttcgaaactattctggtcacctgaaatcggaatcatgtcggaataaccgacgaccacaaaggaaacgcttcccagtccagcaacaaaaaaagttataattcgaacaaggaaacaaatccaaagcttcattatcatcatctgttacttcttagatttgcttatccttcttcactttctcaattttgaatctgagaattcgtgcctccgatctctctccctctcgccgtggatagagatggagagcttaccaacgacggtctcagggaaatcagaccggcgaggtaggttttccaagtctcagaacacctccaagccctctcttatcttggccttcttctcttgtcttgcttggctctacgtcgctggccggtacgtcgcttttttcttccatttccgtctgatttttttcctgttgagtaatatcaaatctcactgattctagatgtgttcttcggaatgcatcccggaattgaatgaggattgtaatcgtcatggaacactgtcttcatagttgttgatagatctcgcagatgctagattcttccgtttttctacaatttttcgccgatttgttaccattctagatttctgtaatttcagatataactgtattgcaatgtgtattttgggtttgagttccattacagtaaatagtcgtacaatctaccaataacgagctcaatttcgatccctggatcttattaactgatactgatctctataatggtgttgtttcttacgtttaggttatggcaagatgcgcagtacagagcagcactcaatactgtgcttaagatgaattatgatcaggttggtctttcttgaatagaaggaactagtatccatttaaacgcgtcattttcactaatcaaatgttttgtctttaatgttgatcatgttcttgtggagtatagaggcctaaggttcttacggtggaggacaaacttgtggtccttggatgcaagtaagctgaatttcttactcaataagatgtttttttgttctgcatatactaacacacaatgtaactgttttatagagatcttgagaggagaattgttgaaactgaaatggagttggcacaggcaaagagtcaaggctatcttaaaaaacagaaaagtgtctcttcttcagggaagaaaatgctagctgttattggagtttacacaggctttggaagtcacttgaagcgcaataaatttagaggctcttggatgccacgaggtagaattatcacccctgctttgtatggtcatttaacaatgtttcattaaaaatatttggtacaatatattaagtattctcttatgaaatttacttctatttagatgatgctcttaaaaaacttgaggaaagaggagttgtcatacgctttgtgattggtcggaggttttcctactcactttattcttcatttctttagaattttaaagtttttcatggtctaatgttaatgctttataaatttccagtgctaaccgaggtgatagcctagatagaaaaattgacgaagaaaatcgtgcaactaaagactttttgattcttgtaagtaaggataactcttttgcttcttttcattgccttcatatatgaatttcttctcactgatgtggcttccaatctacatttttctctcgaaatatgatggattattaggagaatcacgaggaagcccaagaagagttaccgaagaaagtgaagttcttctacagtgctgctgttcagaattgggacgcagagttttatgtcaaagttgatgacaacgttgacttggatcttggtagtacttcctctttcatctctttgtcttgcaaagctatgtttgatccaatcagggtatcaacgatgtctttgagtaacaaatgttttcggtctaacagaggggatgattgcgcttcttgaaagtcgtcgtagtcaagatggtgcttacattgggtgcatgaaatctggagatgtgattactgaagagttcgtatattctcaactatcttcagttcacataattgagatttcctagctgtgacaattgcccaaaagtctcataattaacattctcattctcatattaaatgggttgtttcttggtattcaggggaagtcaatggtatgagcctgagtggtggaaatttggggacgacaaatcgtaagtgtcttatacctcataggtcttctcgtttatgtcaagcccttgtgaccttcgttgtgtgtactcagtttctttgttcgatttatttaggtatttccgtcatgcaactggttcgctggtaatactctcaaagaatctggctcagtatgtcaatataaacaggttaggtttcacaatttggcagaagatgagtatatatgtcaaacaaagcttggtttgtaatcattgtatattttctaccatggtgtgtatatatatataaatgcagtggattgttgaagacatatgcgtttgatgataccaccattggatcatggatgattggcgtccaggcaacatatatagacgacaatcgcctttgctgcagcagcacaagacaaggtgtgaatactactctctcacagaaactgttaacatggttaactgaagaatatttaggttttgcgatcttaatattaaaacacgaatcattgtcttagcagcttcttgttaaatttataaccgatgttatgttcatttcgcagaaaaagtgtgttccatggcatgatcactgcatagatgatcctcttgtcccagagcaaagacggcggtttctcatcgcattcatggcgctccgatactcttttggggcagattcttggaccggatactgaacttatcattagttttgttagaatgggagtatgattaggccattcattacagtttatgattagaggcatgcgtatcccttgagctttggagtaagaaaatggggaaatggtatagatgtgaatgaagtataatttttcctttggtatcatatcaccatcatttgtccgtccattctagcccaatctctggcaggcgtttaatgttcgaaccttaagtttgcatttttggttgctggtttttaaaaatgtgttagttaagacttaagaggacaaaagaaaatcgtctgctttaagctcataaacacttcggaccaatacgtggttaaaaatacttcattgagaaattttgagatattttacaaatattaaagtacttttattttatttcacatttatcctaccatgaaattgcggtcaaagaattagcatcgaacttattatcaaaacagagacaataatcttaaacatttattattttccatactatagttttttcgaaaagtaataaaatcagtagattctttctttttaattagcttcctatagtaagaaaaaaaactcatgactatcccaaaacttttcaattataaaaattaacccccaatgcctccctataaatagttaaatacccaacatcacatttgagcacccatatactctaacaggtactacgttttctaaatttcgtgtttgataaaactccaaagatcatgcaatggcatcaaacgcttgcaaacttctttgccttgttctcttcttagcattcgttaaccaaggtatattatactttatatacaattttaccatagtcttcaattttcgtatatattctttgtcttattctcaaatttcgtattcccaaatcatctatactacatgatttccgatcactataaccctatagtctctatatccattggattaaagcttaacgttatatttttagaacatataacattatgttatatagttaatatatttttcttttcttgttattacataacggaaataaaaatttgtttttccttggaaatttggaagggtatggagattgtagtctaaattccctatctgtgaaacaatcgaaaaccggaaaattggttcagaacaaaccggagtgggaagtgagagtgacgaacccttgcaacaattgcaaattccagaacacagagttgttatgtgtcggtttcaactcagttacacccatcgatacctcgttgttgctgaaatctggtgacgcgtgtctcgtcaacgctggtaaattcatagttcctcacgtggacatcgttttcaaatacgtttgggacacaagcttcgacctcaaggttatcgacggcgttatggtttgctattaaatgttctaaccaaattcttttggtttaattcggttttggttcatgttatgaaactgatgatatttacttaaatgttgtccggatcattagcttaaggattaataaaagatgtttgcttcactattagttcacattctgatacgcttaatgagcgtcgtctactcatagagaactttttaatcgcgtttgaaattaagcaactatcaaaaaaaaaaaaaaagaggtttgatagtgaatcacagtcatgatcaatcccaatcactcaaaagcatgttactttagaatcttatccagctttttacggtttttattttgggtgtgtgattattaatctttaaatgatagttttcgagtaattttacagtgtctcgagtttgaaatatatgaattgggctttggaccagaaaagtaagcacatgttgtgtaccttaacaaatccaaaagataacaaatgggtcttcttaccttaagaaaatattacattgggctttggacccatgtaaaaggcccatgttgtttaccctagagacgggcctagtccgatttaccagttgttaccaatgattcaacttttttaagaaaataataataataataatgtacacaccattaattataaattaatttaatagtaatgtgatgttaaggaatcggtcacacccatcgacagttagatgctatcaaaatctggtgacacgtgtcttatcaataatggcggcactttctctactttcagtttcaaatacgtatgggacacaagctttgacttcaaaggtcatcgacggccaaatcggttgctcttaaactcgaattgatctgctttcgcttcatgttgttttagttattttggcatatgtagcctacataatgtagttggtgatttttttctttaaaaaattatccatttcatttgcttgagattaattaagtatttgtcaaaaaaataaaaatgctatttaattgcatgagatgaaaaagaacattgcagtactgtatctcactttattttcatgcgcaagtttttttttttttcatgcgcaagttagagactaaagaaaacaaaatgaaccagaaattgaatataaccaaaagttagaaccgggtaataaaacttgagaaaattagatgggtttttggatactagatccaaataccatatatatagtacgcttttctcagcgtgatggtttttaagaatgtgttagttaaggggacaaaagaaaatcgtttgcttaattagctttgaatcaaagccttttgacattgctgacaaaaaaaaaaagttttttttttatttttgaagtatttagcaagtttttaaattagtgttaccgaaagaaggtaaggaaactagaaagcaaacaattatagtcaattacatggttaaatactccatcgagaactttgagatattttactaagttattaaagtacatctttttatttgttgaacgtcttaaagtccatcttatctgtctccagtaaattcattttttctcattttcagatttttcctaccaaaatagttttgacagtgcggtcaaagaattagctttgaccttttatcaaaacaaagactataatcttagccttaaactttttattattttccatatgataggttttcgaaaagtaaaataaatcagcagattatttcttttcaattaacttcctataactagtaagaaaaacgaatctcacaagtcataacaaacgcctgcctataaatacccaacatcacatttgggcacccatacttactacgttttccaaatttcatctttgctaaaactcgaaagaatatcagacaatggcatcaaacgcttgcaaagtcctttgccttgttctcttcctcgcattcgttaaccaaggtatattatactttatatacatttatataaaacaagtaagtatatcatagttttcaatttgcgtatatattatttgtctcattatcaaacttcgtattcccaaattatatatacatgatcactataaccctatagtctctgtatccattggattaaagcttaacgttatttttaaatttttgtcttttcttgttattacataaccgaataataaaatttgtttttccttggaaattcggaagggtatggggattgtcatctaaattacctatctgtgaaacaatcaaaaaccggaaaattggttcagaataaaccggagtgggaagtgagagtgacgaacccttgcaacaattgcaaattccagtacacgaagttgtcatgtgtcggtttccaatcggttacacccgtcgctacctcgttgttgtcaaaatccggtgacatttgtctcctcaacgccggtaacttcatctttcctcacgtggacttcgttttcaattacgtttgggacacaagcttcgacctcaaggttatcgacggcgttatcgtttgtccttaatttttctacccgaattgtttcggttttggttcatgttagctaggtcacatgaaactgatgatatatctacttaaatgttgtctcaatcattagcctaaggattaataaagatgtttacttcactattagttcacatgctgatacgtttaatgagcgccgtctactcatcgatcggagaactttttactcgcgtttgaatgatgcgatgttatcaaacaaaaactagaggttagaaagtaaatcacactcatgatcaatctcaatctctcaaaattaagcacgtgacttagaattataaccagcattttacggtttttatttgggtgtgcgactctagctaatctccaaatgatagtttttgagtaattttagtgtctagagtttttttaaagtcaaacatgcgaataaatgaaaaaatggagtctaacggtgaaaaaaatataaagcttggtcgaaaagaagaaaccggtcgcagaccatgtaagacccaagttacgagtaattcaactaaaaaaccacacacaaaaaaaagaatctacacacctttgattataaattaacttaccaataatgtgatgttaattatatatgttaataataatgaaaaacaataaggcacatattatttaaaataaaattaatggtaaatttggtcataaaagaatttgatgttgattgactaatttgtgctagaaaaagaaaaaatatagttgtgaatttcacaaatttataaaataaaataaaaaataaaataaatatgggaaaactgtgaatttcacaaatttattatatgagacaaataaaaataaaataatgaaaatacctaaaaatggccacatgacaaagaaaagagcacttacaattcattaattaaaaataatcagtgtttaaaaacaaaagatatgtatcaacttgagagataacatgtgattaattctcatagattctttattttatttttcacaatttcctaagattaattaaacatagattactattagatttttttaaaaagtataataaaagatagacccaatgcctccctatatatactagaatcaaattaaaactcatatttacaacattttctaaaatctctaatagattatcctaagatcaaacaatggcaacaaacgcttgcaaattcctttgcctagttctcttatttgcctttgtcacccaaggtatatgttatatatcgcgaatattttattcatattattttcacctaatttttgtgaattataaacaataattttatttttctttggaataagggtatggggatgattcttattctctcgagagcttatctgtgatacaatcgaagaccgggaacatggttgagaacaaaccggagtgggaagtgaaagtgctgaattctagtccctgctatttcactcacacaacgttgtcatgtgtccgtttcaaatcggtcacacccatcgacagtaaggttctatctaaatccggtgacacgtgtctcctcggcaacggcgactctatccatgatatcagtttcaaatacgtatgggacacaagcttcgacctcaaggttgtcgacggctacatcgcttgctcttaaacccaaattaattgatctgctcttgcttcatgttattttagttacttgcatatgtagttgatgattttttttctttagaaaaattgtctatttcatttgcttgagattaaaagagattaataagtatatgtaaaaaaaaaaaaactttgctacttaattgcatgaggtgaaaaagaacattgcagtgtatttcactttattttcaatttttcatgcacaagtttttttttttcatgcaaaatttggagactaaagaaaacaaaatgaacccgaaattgaatataatcaaaaaaattagaagcgggtagtaaaacttgagaaattagatgggtttttgaatattagattcaaatactgcagtaatgcaaacatcccgaatgttacgtgatcatcttcatgttagcaaagagagaaaacacttcccaatatagtgtaaaactcagttaagaagaaattgatcccttggagaaacgagaaaaagattaattatacatgtagtaatattaagaaaataaacctttaaaacggtttaaataaaataaagaagaaactgaattcttgggacttgaattttaaagttatgattgaaatttatagtatatattaacttattattaaattgtagtttaatttcttagtctcatattaagtaatgaagtaaatacgctgccaaattgtgtataataaacaactttaaacaattgacgacaaaaaaaacaaaaaactataaacaatttacttgactatagtatattatattattttcttttttcgttctctatattcgtctaaattatgtttctctatttttatgaactcaagaaacgtatctatataatttaaggcagcaagagatgattaaaacatatgcgatgcatatataaattcacctctcgttctagctccacctctaaaaacactaataaaaaagtaacaatggcgtttgctcttaaatgttttgttgttgttcttcttctctctatggtctctcatggtaatataatcgaatctcgaacaaccttttagtatgttgtttcatgccttttggtgaataattagtcttaaatttcagtcatcatcttggagagcctaattttttttttttttttttttgtgtgcacaggagtgcctaattttcaattaggacttagtttgatcttttaatatgttgtttcatcgctcatattcaatttttttttttttttttttttagcaaattttcttaaattatgatcgatttattttcctttcagtttgatttcacttacgtttatttacatttggttttcatatcgttttctttttgttcgaataccattataaagatgttcatgcatcaataaatgttttttctatgtctgaaaccatgcatcagttatcaattatgacgctcgtatacgttacaaaactaataaaaatggataataattaatgaaataataaccgacaggactgtgcctttgcacttttggcaagatccagatcggagcggtgaggacaggaagagaaatcggcgggcagccggagtggaaagtgacggtaatcaacacgtgcaattgttttcagaagcacgtgactctatcttgcggagggtttgctcctgcgaagcctgtcaagccattgctgcttcagccacaaggaaacacgtgtcttatgattaaaggagcagctttgccagctggcgccaccgctcagttcacatacgccggccagccttacatcttcagacccgttggttccaaggtcgacccaagttgcacgaattgatttttaaaaaaaatatttgtgggtagaaaaggttatcagatttcttgcggctcaaggacattatattgatgtttcttataatccaagaaagtgtattatgactccttgtgtgaaacttgatttacatacagaaatgttagaggattaagcgtgattcacagaggttacgtttgatatcatttcgttttattcgttgatggctgaggaatttcctcttcgcttgcttctttgttatcatctttaactttaccctttcttcaaagaatggactgtagtgattgtgaaaccagttggtgtgaactgatgtcttgattgtatttagttgaggatttcgtctgttaaattatgttaagccttttgaggattttgtgtgaactaatgtcttgattgtatttagttaaggatttcgtgaaggaaaaagatatactattcttagaatttagagatacaactttttaattttacaattttaatatggctttcttttcttaaaatatcttgaattttttatcaatcaacaatttttttgatggaattttaccagtcaataatcatccactccaaaatttacttatatatatcatttaaatctttgaaatcccttttattttcctaaaattagaatatatctaaataaatataaatgatatatattcaactcttagtatatattgtttcttctttccttttcttcttttgttaagtaggatatattgtttatatatattcttatgaaatcaagaatcttatctatatattaattaaggcagcaaaagataatcaataatatcaattagatgccacttaccaaaaaaataaaatataaatttgaggccggttttctcattctctgtctctaaactaaagacacaaataagtgaataacaatggcgtttgctcttaaatattttgttgtttttcttcttctctctatggtctctcaaggtagtttaatcgaatctttaacgttttgtatataacctaaagtttcatgcctttctttttggtgcatctatataaaatctcaattggcaatcatcattttggagtgtatttaatttcagttttctattaaattcggtttgatttttcgattatttatgaaaggtataatctgaatgaatctcttatatgtaatacatttttcgctttctttattaaaaacccattacaaaatgcatccatgattcaattactgttcgtttactaataaaaaagagcatgaaacaattagtaacccacaggaatgtgccgctgcactttcggcgacatccagatcgggacggtaaggaccgggaaagaaatctccggacaaccggagtggaaagtgacggtaaccaacacgtgcaagtgtctgcagaagcacgtgactctgtcttgcggagggtttgctcctgtgaagcctgtcgagccatggctactgctcccacagggaaacaggtgtcttctgatcaaaggagaggctttgccagctggcgcctctgcagagttcagttacgccggcgagccttacatcttcagactcatcggttcgaccgtcgatccaagctgcaataaatcgctgttataattaagcttctaaatacattcttttatcccaaaaaacagaaacgtaaaaatcagatttttcttgtatctcaagtaaacagaggttttcttattgtccaagaaactaggtaatgattccttgagtgaaacttgagttacagacataaatgttttaagattaagctaagaaaggacaaaagtaaattttctttaatcatatatattacggatatctagtggtgccaatgatacatgaaaactaaccttccgtcattcgaagtattcgtctgcaagtaattcaaaagccatgttgagatgaaaacagagcacctttcattgagcagagcaacaccaggaagcctaaataggtcaataacctctttcaaatgcacactagtttatatcagtacaaagattctataaaatttgatgcaactaatgaaatatcaagctcattttgtgtttttcggtgacaggcaacacatatggctcttttgggctttaactcttgacttgagtgacatacgttaccagatccatattgggcctgaagcaatttaggccttataagcctcgaattggtttaaaatcgagtgcagtagccggtaaatcttttgtaacggtgaacagtatgctcgacaagataaaaacgtaatctcttttcgttttgttaaaaggctttaaaaacgtaatatcttccgctctaacgttacagttttaaatcaatagaaccagttgacgcaatcaaatcattttatgttttacaaacattacatgactcactcatacggttttttttttcagttttaaattttaaccaaaggaacatttattagtttgaattttacatttcacaatcccatctattaaaaaaaaaaggaaaaaaaaaactgatcattttgtttgtcggaaaaaaactctaataaattatatagccagctaagcaaactcttttaataatgaaaagtttaaaaatgtccatctttccagcaaaacaaaaccaaagacaatgtcgtctttgctgcgaatacaataatgtttgctaatttgaacagacaatgttgttgttttgttcttaaattatattaagaaggaatttctgaaacattagtattattttaattagtggattagggttcactccacctatacagatagagtcgtgtcgtgcttctctggcatttccaccaaaccatattttgtacggaaacatttctttcttctttcttcttcttctcacgatcggtcaataacttgctcataacaatttcgaaatcctctgcttcatcatttgaacttcgatttaagggttcttgaattttcgaataaaaatctcacctttaaatgggaaagccaacggcgaagaagaaaaatccggagacgccaaaagatgcttccggcggcggcggcggcggtggaggcaagtcagggaaaacttaccatcgttctacttcgagggtatttgacgaagatatggagattttcattagcagagcacttgagctcaaagaagaaggtaacaagttgttccagaaacgcgaccacgaaggtgcgatgttgagtttcgacaaagccttgaagctcttgcccaaagatcatatcgatgtagcttatcttagaacgagtatggcttcttgttatatgcaaatgggattaggtgagtatccgaatgcgattagcgaatgtaatttggctcttgaagcttctcctaggtacagtaaggctttagtcagacgttctcggtgttacgaggctttgaataagttagattacgcgtttagggatgctcgtattgttttgaatatggagccaggaaatgtgtctgcaaatgaaatctttgatagggtgaagaaagtgttggtggataaaggtattgatgtggatgaaatggagaaggactttgtcgatgtacagcctgtttgcgctgctcgtttgaagaagattgtgaaggagaggttgaggaagagtaagaagaagaaaaagagtggtgggaaggatgaggaactgaagagtccaaaggttgttgttgttgacaagggagacgaagcagagggcagaaataagccgaaggaggaaaagagcgataagtctgacattgatggaaagattggtggcaagagagaagaaaagaaaacaagtttcaagagtgataaaggacagaaaaagaaaagtggtggtaataaagcaggagaagagaggaaggtggaggataaggtcgttgttatggacaaagaggtcattgcttccgagattgttgatggaggaggaagcaaaaaagaaggggcaacggttactaggactatcaagctggtacatggagatgatataaggtgggcacaattgccgttggattctactgttagacttgtgagagatgtaatcagggatcgctttcctgctcttaggggtttcctcattaaatatagggatacagaaggtgacttggtaaccattaccacaactgatgagctgaggctagctgcttctactcatgataaacttggctcccttagattatatatagcagaagttaaccctgaccaagaaccaacctatgatggcatgagcaatactgaatcaactgacaaggtttccaagagattaagtagccttgcggacaatggtagtgttggagaatacgtgggatctgacaaagcatctgggtgctttgagaactggattttccagtttgcgcaattgtttaagaaccatgttgggtttgattctgattcgtacgtggaccttcatgaccttgggatgaagctgtatacggaagcaatggaggatgctgtcactggtgaagatgcgcaggaactctttcaaatcgctgctgataagttccaagaaatgggggcactagctttgttgaactggggtaacgttcacatgtccaaggcaaggaagcaagtctgtatacccgaggatgcctctagagaagctataatagaagcagttgaggctgcatttgtgtggacacagaacgagtacaacaaagctgcagagaaatatgaagaagcaattaaggttaaacctgatttttacgaagctcttctagcacttgggcaagagcagtttgaacatgcaaagctttgctggtatcatgcactcaaaagcaaggtagacctagaaagtgaggcttctcaagaggtcctgaagctctataacaaagctgaagatagtatggagaggggtatgcagatctgggaagagatggaagaatgtcgtctaaatggaatctccaagttagataaacataaaaacatgttgcggaagttggagttggatgaattgtttagtgaagcttcagaagaggaaactgtggagcagacagctaatatgagttctcagattaacctcttgtggggttcgttgctatatgaacggtcaattgtggagtacaagctcgggctaccaacttgggatgaatgtttggaggttgcagtggagaagtttgagctagctggagcttctgcaactgatatagctgtgatggtaaagaaccattgttcaagcgagagtgcacttgaaggtaatcaattcttggcaagaataccaaactctggacaagttacaacccaatggttttctgtttataacaatcttagaacaaacgcaggtatgggattcaagattgatgaaatagtgcaggcatggaatgagatgtatgatgccaagagatggcagatgggtgtcccatctttccggctagaaccaatgttccggagacgagctccgaaactgcatgatatcttagagaatgtattttcagggcctgtttgacgaaatattcttctcatatacacaaaaaatatcagctggcatcagattttgtgtatcactaggtaagtagtaactcatttccgcttcacataatcctgaatatatggcagtctatatataatagtcttgggttgttagtttgcataggttgaatgaatgctatcaataaatcattcttgttatggaacatgaactaggtggtattagttagatttattgcctttttgaacaatggttaaaccatttgatgatattgcttacctcggtctcaaagatttccctagaatcgcgataagttaatttatcctttgcaattctgtattttaccagttttttctggctcttgtatgatgggaggctaatcttttgtatatactattgcaggctttgtttatttttgggagtggtgtgcattatttctcctctctattggtatggttttgtcgttttttccaaagaaatattttttttgtgatatactcttggcctctgcggttttgaatgtcgtggctgagactgattgggattcagtctagagaagaaggttagatggtgctaattctcttctctgcagattgattcaaaatattggttatttgttgttctttgttttgtttggtttggttttataccatagctctgtaatctttgttatttattgtcaagttggattagtttctataaaattcatgattgttgtgcgagtatctgcgtcacttgaaaaaaaattcagactctttttcattccttcataaagctaatagtgtacagcatattttgacctaatcttaaaactcaaatatatagagtcttacaaacgatttcataagcaattgtctctctcgattttctatctatagattagagcttttctttgacttcgtgacttatccagttatccttaacaactaaatcgagattcacttgtataggacaagaattaggcaacaggaagtaacaatctcctttgaattacaaaaactaaaaagcatcacataatgagatattgtttcgttctgcaagaagagaaatttgtctcaaaatagaagaaaagattgattttataagcttaagattatatacaaagatatgtatcaatttcttagccgtgtaatctttaacagagacttctgttttatgcaattaccatttatcattaacaaaacaaaacaaaaaagttcataggtcgatcaaactatacacagatttattcagatttctttcttacaatgccagcgtggagtaatcataaaatctctgggctcactcgtatgaacccaagagcctcaaaaaatagtcttcgagtttcatcggtaagccccaaagaggaagaagagtcttcacgatgaggaacagttcttagaacccttccatccatctgagaagtaccgagacaatccttttgcaattggctgtgccacgtccctctctcttcgatgcagaacccgcaaaaactcatccacactcaaattcccatcttgattcgagtcaaacacatgaaacgcaatttctatcacattgtctgacaatgttattccacatacctgagaggcggctcgtttgaaatctttcattgtaagtaaaccattagctttgccataagcaaaaagcgctagagagaatggtccaagtttactacgtagctcatcaaactgtttgaattccttcagtgagatacgcatgtcccggagatgcgggtgttcgctcagactctcaactctatcaagcagcttgctcaaatggcttgcatcagccgctgcaaccatcgacaatgcaaaatctttggccgatatacttcctcttcgtttatagtcataatgtgcaaactccagcctcagcatctataaacaacataagatcattctctttcagcctgagcatctctaggagtttaaacgagtaaggagatatattaaagggtttaagagttagttacctcttcagttagatctttcataaacttagtgaatttgtcgtgtttcagtttttgactgccatctttcccaaagaagtattctaccaatcctccatcctcgacagaaccggtcatatgtaaccctgttcgaaggccatctctgtggccaactccttgtctatgctgagatcgcatcagactcatcactgtcttaaactcttctttgtcaatctccctaaaacaatcattcgtcagtaccatctcgaggaaatagaagttacaaaggatagaagcactgaccagatgattcagcgtaaactcaaaaagagactccactgattcccacaacccgtccgtttggaggatcacaatatgggaatacggaccagaaaaaaagttaccaaaagcatgatttatctatttacatatgtgaacgactactcacccgttgttgtcagtatcaaacattttgaaagccactgcgaagcttgattcaggaatgctgagtaatgtcacaaagaatatatacctgttcccaaacacatataccaagtaagtactgaaattttttccaaaagaagaaaacataaaagggggatataataagtaatgatttggtttcagtaactcactctttgaaggatataagaccatcattatcaacatcaaagagcatgaagaactcggaaggagagcatctaagttcaccaggatttctctccccagtcaaatatccttctcttactagatgagattctgatggaggaaacacggggacaattgccctcatcaaatctgccggtttcattagtatttctcctttatctgttcgaacagatgcaaagtactcgaaaacctaatgtcattaagaacaaagcaaacaaattacttggctatgaacaaatcttatcaaccagatcaaatgaacaaaatataatcttatgaattcataacaacaactaagcagaaacagagaattcacaatcaatcaattacaataatcgaaatagaaagcttaaggaaaacaaaaacacattggttttaaaatgcaccttttcaggaggactttgtaatctcaaacgtttctcgtaattgaagaagatcttccttctatacgcatctgttttcaaaaccaatcaaagttagctcatttgagagaaaaaacagaatcaatgaaattaaagaacgaagaagaagatcaccgaacctccgaagatgaatccagagctgtaaccaggcaacgacaatttcggaataaacgatctcggtttcagatcgccgacttttacaccacaaacagaaggcgttgaactatcagcgaaggacaataaattactcccaccaaacaaaccagagatggaatcagaagaaccagaggaccaatagagaaaccctaaggcggatccagctgaaatcccggtgatccatttagcaagagatccaccagagaccgtacacttcaacggatctgcgccggagagaatagacgcagaaggagaagattcagggaaggaagaagagctgccgtggatcctgagtcgttggatgagaaggaatgatcggtcaacggacggtagagatgatactgatctgtagtgagataaggcgggcataatgaatgatcctgtttctctctctctctctcttatttttcgcagattcttttgacaactaaccttccttaaaggtttgtttatttataaggaggatttatccaaccaacgaaaaacgcgtttgtttctgtttactgttatatggaaacacggcgtcgtttaaagatttgaatccttcataatcggaaccttatcttttagatttgcctctatataacaagtcaaattttagacttgcataaatatctatatatcgtatctcatttcttggtggggaagcatcataaatagagaaaccatgaattataatctcaagtgtatataatacaacaacgtggagctaataaactgaacaaaatttccttttttgactatttctctccctcgaaacagcctgagaccaaatctaatagtttctattgcacaacgggatgtttcataatggtgggaaatcgatttatccaccgagagtatcctgttccataatcatacaagcacaattagagcaagaagaaaacttgttgtgtttatcgatttaaaaagtaaagagaagccgaggaaaaaaaagtgagagagatgttgaaaccaaacctgctcttatgatttcaagaagatccgcggtatcagacatatcctgcaacggtaagcaacagttcactaacaagcaattctctctaccaaaacaagtacaagagactctatgacaagtcacggattattatacctggccacttgaggacaagcttcttgtaacgagccgggccaaactatccagggagcttctgctaagttgtaaagcatcttctgatgtgaaatcaaagatcagagagcatatgcttgcagccatcattactaccgaatggtcattactcccatctgtgacaaaaggaacagagaaattgacatattaaacatggtcttcgatttttgtcaagaaattagtaggcagatcagcagaagcagtaaaaatctttttttttacctgcccaatatgccaaagctttcaatagactggcaaatgttgaaatttccggcgggcttatttcttccctctgttctcaacatttaaaacgtgaagtcattatagggtttagcaattggcaaaatgtaaacaggtcctatcttagggaagagagtaccttcaaaagaatattcatgattgtatcacaagccaagaatatgcttcgatcctcatcaacactctcaccacagcgctcaatcaattttattagacattcaacgacctgtattgaaaaatcagtcagctccttataagattatatacaagataaacacccacttgaaatacattttggttcagcatactgagagatataagaaagctgtaaatcagatttgttcaaacatattgtcatcagtataaagaaggtataaagccgagtaactcacagctacatcgcctcttgaataggccaagagtttacatccttctgcgttcattgttatttggcaaagcattgggagcaagaagcaagtagacaaaaacgggctgtcaaaacaaaatagttcagaccaagttatcctgggaggcatgactcaaacaagctttgtaaaagaaccaatatatcaagtcaggatgccttcaaacctggattcatcttcgcccttcactgaaagcatataatccagaagatcctggacctgctctttgcacgcaacaggagtttccgcaagatagctgttgaaaacacaaaaaaaggttcagtacctgccaaagtggtaaggatacaatccatgtccttacacaaatttgaatgataaatgatgattacataaacacaatccggtatacattttaaacaaaaataaatcgaacgagagatataagaagaaacaaaaagagtgattatctataccttccaatcactcgcacagatgcaagaaggtcagttcctttcttaattccatgttcctgtatgaaacagaattaacatgaaaaacattttcaagcacaataagacattcctaagagtttgatgttatcatatatgtatagtacctttgcatctctgagatattcgaacaccgctcctactgtctcattaagtattttaatcaccttttggaagacagcttcgtcagatagagtccctgcaaagatcaatacgtaaatcccaattctttcatgaagggaaaaggctgacacgcatgtatacactgtttatcagcggagttaatagacatttgagcaataactaaaagctcttatgatgtttatatagtactgattttaggaataacatagaataacagaaaggtgaaagaaaagggatcgaatatgctagtactgactactgatagtagattggaaacattaataaaacatgattaaggtctaagttataccttcgttttcaccagcagatgatatatatttgatgatcttttctaccagtgaaaacacgatgggtagataccgttgcttcaagagaatgtcttcagcagttgaattatctttaggagcttcatacttcttgtaagcgagatcatttaacaatacagaaatttcaacatgcgatgactctaataccaacagaagacacctacaaaagaaatcagaatgatattaatctttatgtcactaggaaaatgtaggttaagtgagagtgtaatacaaagatgttgtatttacctatcagctggaatatcaacattgggtaattttaccccgccgagaagccacttttcacccaatattgacatcatattctcagccagaatcaacgcatgaagcttttcggaaggtgctacacatgaacaagacaggtttcttaagtatcttgagaggattgttgtcatataacaagtagatgaaattcagggctggcaagaaaagaatgccattaatgggtatgccatttccagtgttccaaacaaactactaacttacccacacggttctgcagaattgccacaacacctgtgcgcatatagtctgcccaattgttgtcgggcatggaacgaagaggttcatgaagaagttcctaagcataacgaacttctatgagagacatataaaaagataagcacacaaaacaaagatgtagagcttctacaatggaaacataacatgcatattaaataacatcaagacgatgaaggcaactgtatttctccaagtaaaggaaaataaaactttaatttttccaatttcaatggacagaaattttgaaaatttagctgcattaaatctacataaatcatgctagtaactatagatacttttccggaggaagttaagaagtgaaaactcacagaatactctgacgagaagactgcagacagtaaatggagtgcttcaaacttcagggcattatgcaacaccgcaaactgccgtgcaacagcagcaatctgaataaaagttaacattatgtttggagtccaacttcagcattgcagctttagtaagtattgcgaaaagaaaacaaaaagtaaccaagtaagtagactcaccaccaaagacagttctaagaagcgttcaatagtcatgctcccacaatcaagcttactaaccaataactgcagaatctttatagcaacctccatggcatgtgaacctgaataacatgtctcacattagctcccagtgaaaaactattatcaaatccatctacctcaacatggcacgttttctttgacaccaaatataatcaatccgaaatagcattcaatggaatctaatgtgcatcatatacacaacaaaagaatgtaaacccaatgaaagagtatgtattaccatcaggtaactcagacatctggggagctatcactctcaagcctccagagttaatcaaagtcatgagaccagcttcacaagccgtggacaccaaatacagaagctcatagcaatcttcgagcatgtttgtagttattctgaaattccaaaagccaatttcctaactttaggcaatcacaatatgcaaaaagttgaagacacagaagcaaagcttgattaaaaaaaaaacttcatggaaagtcgcaaatgcaagaatcaggtgatctaacataccctttggacattacttcgagaataaggggaattctggagaccatctcttctgaagaagctatctccggaacacggcagaatgcagcaagaacagtgatagatatctgcagatacacatcacgattatcaaccccatcgccactgccactacctgcaaaacaaaaaatcgaaaccagtcagagcaacaaactttagtatctcaactaaaaaattcacactttgtagaaaccccaaaattgatattagtatttactgagacaaagatcaataattcggggttttgattaccagtacggaaaagacggtcgagaaagtgagtaccaacggcttcgtagaccttgttgagagaaacgatgtcatcgttcttacagaatttggtgacgagaagtagaccggcgagcctctgctcgtctctctcccctttcaatagcttaaggcaatcgtcaagcgacggagatcgttcctcctgtggtgctgctgccataatcacccaactcaaagagtaacaaaagtagaccaagtcgagagaaaggtaagcaaaaaaaactaaaacaaaagccgttcgttggagaagctgaaggaagaagaaacaagtcattaagtcggcattcagattttgggccaaataccaatgggctttgttaataatacaagtgaaatcatttaaaattatcgatatattaaaaattgaaccatataaaaaccgagccgaacgtaaccatgcatcaaccggtgagagaaatcagacgaacacaacaacatcgtaatactacatttcaagctagtttaattatgataaatattgcttgatacattcattacaaacgaacatattgacactttacaagaaaaaacccacacttgcttaagcgttcgttacaagacgcaaaccaacgaaacagatcacttccaaaaactactaagtcgttacaaacaacaatttggactccagaatccggtttcataggctaaccggtatccactatacaaataacacactctgtacgagcatagaaccggattcgtttctttcatatacggttcccaagaattcacatggcaaagaaccatcctctagttagccgctatgtcacctacgacttcccggtcctgagtttggttacaaaagaagatcttgaccgggttggtttaatgaaattgcgcaatttgaaaaagagaacggatcttgttttaccgtttacgtttgttcttggtgagagtagatgacgtggaagagttgctgttccagtttcttttcctctggttgatgaaccaattgttgatctgtttcaactgcaaaccggtttcttgaaccagttttgccttatcttcctcctgcaattccaaaaccaaatcacgaattaaaaccttgcttttgacaatgtggtaacaaaacttctcggccaaggtgtttacagttgggtatggccatttcgagtgagttcgccaccattctttgagtacagaagtcgtatctcctggcaactttcccgcccttctcttcctcattatctcttctcttatgtccacaatcttctctttgaaaccctacaggggaaaaaagaaaccgagcaacatgatttaacaatgtgttttgtatagtttgatgtaccattgcagcttgatcaagcaattacctgtttaagctcatgcttcagttctttcttcacacgttccatcaaagatctctctctctcggttggaacaagaggaccaaaccccatcaagcaatctgaaccgtccaaacttccatcaaacatgttcacctcgctctctacttgattatcatcttcatcatccgacattgtcttaccattactttcacttggagaaactcctacaaaccagaacaaagaaaaaccgataaaaccaagacacacataaagcaagaagacaataacaaaaaaaaaaaatgatttgggacgttaccagttagggattgcagtgattgttcaatctcccaacaagccgtaatggcttccattgcatggacacaaacgtggtgttggagttgttctttaaatgaacataacaagacaacataatgtgactgcatcaacataataatcaaaggtaagattccaatccataagacatacaaacagaacgttacaaaaaatagattatgctttctttctcttggacatgcaaagtccttttcagcaagaatcagacaaactattagtcatcaaagaagaagctttatgcaacaaatataacttatttgagtcagacaaagttcataattcgaattacaagctaaccaaaaaagtagaagcaaagatcatatcgattgcaagactcgagaagcgggaacaatgagccacacaaaaatgtgaatttgctatactcagataatcaaagagaaataaatggctgaatcgttcacagttcaaaacattaaaattttgcaaaattagaaagtgaaacttaccatgaaatgatcaagttccttgttgtcaacaaccacaccaagagtggagtatttcgcggcgacggtatgcaactgactgagctgagcatcgatcctcggaatctggtcaacgggagtcgcaaccctaaggcaagccacgtgagccgcaagaagctgctcgtacatcggatgtcttaaaatcgccgccttatagctagcactccgccaatcttcacctcctacaacgccgagtatcgtttcaccatcggcgttgactccgtcgataacttcagaacgtacttctccagtattttgcatctccgaatgaaaggagagccagcgtgggtttgtatcagcaacggaattgtctccgttgcggtgcggaggagcgagatcggaatccgcagtggtaagggtggtagggaggttgaggaaactggcggtgacaagcgaaggtgtttcagagaagtgacgctgcggcggaggttgctgtgattgatcggtgaagtgtcggagaggaaggtcttcttgtggaggaaggaggtgggagctgttaaacgacattgttttcctgcgtttttgggatcggagaagagaagactgttttctctttcccctagttatttatctctctgaagaccaatattttttaattaatcttgaattttatatttatatatattttttttttttttggactctacttcaatctctttgttttaatgtcaacataaagcctgtaaccaaaatgaagcataaaataactcaacctacaagagcctgtaattctgtaattcacaagttttgtgagcaatgatttgcttacaaaacttctgttctagagtgtaattttcttctttaggtctttattctccaaattatgataagtatatttaccattaaactcattgtagatatttttaaaacccagatatttttttcttttttacatgaaggaatgtcatttttttttaatctctatacacaaaagacttgggatccatgaaaaagaaaataagctcataaacaagttggcaattttttctcaaatttattgggcatttaaaaacgaatctttttccatgaacacgccgacaacccaccaatagcattacacctcccaagtttatattataaaaattcaaattaaatagtagaaaaatgaatgtccaaagagattgatagatcttcttgtcttggattagttgagcggaaactagggttttaatataataatgtatggagaatagtgaagaagaaaatgtttggaacataaaaagtctattagttgtcctactttttcctctttacaatttccaacaaaagcttttaaatcggtacaaagagaaagaaagaaaaaaaaaagtagttaattttgcattaaaaattgataacaccatctatttaaaacaaattttttcttctaacacatcaaattaaagaaaacagagagggagggagggagggagtaaaaagtaaaaacctaattttcaccctcttcctaagaaaaaatcaagaagtaattgagcattttaccccaaaaaaagaaggaaacggaaaaccagaatgtgacgggagagtttcattacaccacttattacattcacttttcttagttgacatctctagctcccttcttcccttcactataattcgatcgcaaatcttcatataggccagtttttagctagttccgtacaatatctcttcctcggatggcgccatgttgagatcagggaggacgaagaaactcccctgattttgcgagtcactggttttgcaagattttgatccctgtagccgctcgagttgtgatttacgaatcaaatcaacaggtttcttgtttgtgacacggcctgagtttaagtcaagctgaaacaagaaaacacaagagtcgatgagaccagcaaatagagagaagggatctggaatatctgattactgtaaagatggttagggagaatctaaatgttaccttaatcctcttcagcttttggttcctaaggttttgttcatcgaatgttgctcggagacttgcaatctcctgtggaaaaatattgggtttttttaagaatacaatgaaaaccatgataataaaacagagaatagcaacgaaaatctaccttttcaaggtcaagtctctccttcaacttcaagttctcttcatttttaagctcaaaagatgactgccaaatattaaaagaataaaaaaccatcagctcaataaaatttgaattttggagtgtgtacttgaaattcaaaaaggagactttatatttaccttcctcttcttcaatctcttggagaaacaactggtgatttcgtttgtgggaaaaacctgcaaaacaaaaacgcatttgattagtcaactattaaatggctgaagataacgacaactgttttacttttataatcaatacccaagatcttattttaacataccggtaaaaagtttcttttcccacaacagaaatttcaaacaagtaagaaaaatatatcgaagaaaccaaatagagcataaaattaaaaaatctcaaatatataattgggaaagaatttttatagtgaggatttgatgccacatcatgattattccgtgtcatgggcattgtcatctatcgtcatcactcttttaaagatcacgtgataccaatctctccgacaagatcattttactcgtttcaactttcaacccacaaaacgctaccgtctcgagcatcaaaacgttcaataaaacgcggacgcgtttgaccaactagctgttaagctgtactacccccaaaatctaaaaggagctttaattattcctcaagacaaaattaaagttgaccgatttctaaaaatccacatctaaccggccacgcaagatccggttcaatgcgtaccgagaaaaacaggtctcttattaagctttgttacagaagattagtagagttttctaattacaaaaaatgagcagaaaacaaggaaattaagcttaaagtggctttgactttttggagattagatgaatttaacctagaagcaggatggctccggccgacggtgtcatcggcgaatcacggcggaggaattttttccggtgaatttgttagaagttgaagaaaacagactaaatacgttctagtgagaattgaagcgtgcgagagatgacgtcaggctaaactttatggattttaggaaaaaaaatgaagaaaaacagagagacggccaaggatcttctcaattacgaacggctaaatccagatttatcggccagatcggaatcggattatccagcgagatgacggatttgccatctctccggagctaccggattcgtaattgagagaaagaagatagagagagaagactaaatcgagaggcaaaagttgaaaatcacgatagggaaaagagaaagttaccttagatccagatcctgtagatgtagagcagctagcttggcgactgttatcctcgaatccatcggcggaaggagaagcagagccgccaccacttccagatccgccgctccacgagagaggagtcttcggactggctctaacggaatcgacatctttcttcaaggaaacgagaacgccgccgccgccaccaaatcttgaggaacgagaccgtcgttgacggattccccaccgcaacggagggagaatcaccgccggattatccgacactaccgttccggcatgcttcagccgtaaaagaagctcaacgaccaaatcgtcgtcagttatcgctacagccacccaatcatccttggccggaatcttagacgatgtaaccttcttcatcgacgcttacactactcaaatctacagctcccgtaaaaaagggaatcagatacagaagagaagcagcgaaagagagagagggaaagaaagagaagttacagaagagagataatgacgaagggagagagaaggagaagaagaagaaatatcgaaatagaggagaaagagagagagagagatgggaatggtgttatatacgaggctccctctaaattattcctctatctcttttttcttccttttctcatttttctttgttcttttcgaaaagaaaaaaaaaatgatttattttattgccattttaatgtcgatgcgaaaatgcaagatcgggtctgtggctggatggattgcagatttggatttaatttttttatctcaatggtttgtttgtgatgacaaaaaaaataagaaaggaaaggtgggacccaaaaactgagttgtgtggggaaagggtatgtgaaaaatatgtaaagattccccaaattaaaattctctcgcaaaattataaatttggcataatgctgaaattaaaagaataaatttttaaaaataggcaaaattactttagggttcgtctttttcgttttgcttttttttcccttgttaggtagaaaatcttcctatgctctcatcaattatgatgttcgtagagtattgcaaaggaaccaacaaaaaaaaactgacgtggctcaatggttttgctaagcttgaccaatgaacaattgacgactgtgtaccgccgttaataggtaaaggcaagttgctacattgtggatgagtaaaaaagagtttctgtcattaatgattatatatcttaccttatgtttcttttatagaagaatctctaaatgcagcagatttatgactaagaaattttttagaattcaagccccagctgtccagccttgaagagatatatacatgggccttaaatcgggctaaggtgggctgtctaattgtgagagaacattatatcttatacaacttggaccaaacaagtggcatacggtatatgatattgagataatgacacccttagcaagaaatatcaattacccacctaaacaataataacatccattgctattaaacccattgtaatgatgataattgagatagcacaatatcaacttatcaacttagagaaagtcactttcaacttctgatatcaaattggcattagtgatttgtttatacgctggactagagattatatcaatttgtcaatgtctttgcctgtcacacacacacacatatcaaaactgtcgctcttacatcgggaaacatctgtgcaagttatttttttgtgcgccatattctccgagttgtttgagattacagaattgctaatcaataatacaactcaacatatactagtcacaaattccataattttccaaggtacaattcattgagatcatttgcgtaaacccatcgtatgttcatttgtttatggttttattgggtcaaccatcttatttaatctcatgtgatgtgtatcaaatgtccaaatactgaactttaaacgccaaagataaaacttaaattcgataatattaaagatagagaagtacagagaattgtagtacaaacggttacatggaaaccttaagattcatctaaccagtaattacatctctttactttgacttaacctagacgacacggaaacaaacgaagaaccttaaggaaaaacagaaagatacccaaacgaagaagaaaccccaaataaaacttaaacttgataaactaaaaagatagagaaatacagagaattgaaaaaccgaagaagattacatcaaaacctaagcttcatctttacccgtaaacacatctctataacttgtcttacgaccaactaatccacttaagacacagacgaaatgacaaaagccaacctatgatttacccagagaacctgacgattaagcagaaattaaaaacccgaagatacagagaaagatacgaaaactagtaaaaagtctatacacaaatactcctacacaaacactaaaccctaagaagagaaactaagacctgttaagaagatatttcgatcttgccccttgaaaaaataagggaagattcgaaacggttcataacgaagatgtgtgtttcttcatcttctagattcatcatcgtctggagattatattttgttgcagatctccggttttcaggcggaatcggacgatcggtaatacggaaatgtaacactttggtaaccatttggatcatcggagatttttaaaaaatcaaaaatgatcggtgacagacaccgtcaggcgatgtctaggcgaaggatcctgatgagatcatttgttgccttcttcgtgaagaaagctggaagcgggacatcgctaggaggcggcgaggtcatggtcacaggaccggcgtaaaacggtgctgatttcgatttgcggccagataaacggatctgacccggaatcaaacccggatctggtccaatccgacgagtagatcccagatctgacatttccacaaccagatctgaagtctccttggggatttcttcgccgcgcttaaggattctcacctggctaacggcaacggtattgctaagactcttcttaagggttccctttggaacgaaagcagagacagccgcacgaggaggaggaagcggcggcgctacaggaggagaagaagatctggaggattgactacgaggaggactccggcgtgtacggttgttggagaccgtcttcttctgcctgttgggacatgcgctaggattacgatgttgtttcatgtgagagaatggatctttcaagcaatcctggggatttagaacagcgacgcccatagctaattgagaaaggcagatttggtggttcagaaacagaagaagaagaagaaatttgttaaattatctctcagaaaaaattctcaacggctcggaaatggaaagataaattagaaagatggaaatgaatataatgagaaggtggaagaaggatagttttatacacgattaaatttgcttcagcgtgtccaagaacagcttaagacggtttcttaaccgactctcggcttctggtttgtgaactacacgcgcttagttgtctcttccttttttgttttttgtttagcttttttttttttttttttttcctttaactttataattactttccttgatatgttaatcaatggatcaatactatggttgtgaataagatatatgtcacataaattctgtattcttttcttttttattctcatcacatatgtgtgttatcattcaataagaagctttacatttttcatttcctataccatttcaaaaaattaaaagtattcaaatatgtgatattctgtgtgatgtatgattacaatctccaaattcaaaagttcaaaggtaatttgtcaaaattaaaggccagagattaaaatttaaacctaatatcttacatctataagtacaattgaaagcattaaattactttataaaaaatagaaaaaaagctatgcatattttaaagcattagataactttataaacatatataatttgaagaggacatatggctgctgatcccaaaactctacttcttacactgaggactatttcaatattttgaataagaaatggtatatcaccccctacacaaaaatgaagtcacatcaaaggttattgtgcagatgtttgtaattgttgacaaacaaaatgattaacactaaataattaagccaagttgtcaataataatacgaaataattgaattaaaaaaagctactttgccgaacagtatccaagcaacaaaatcctccattacgcatttgtcgctttcatgatcacatacgttaaacattaaaataataccccattaggcataatatatctcgccctttggctttgagtaagctttacattattcccatacattgtacatccataataatatgatattgaaacgctaattttaaatttgtatttatgtatataaatccaatctttatatctaattaacgagaggtaaaagactattaaacattgagaaacccaaagatcctaacgattatgtcgataaacatattgatacgaccttgcaaatatgtaacaggttcgtataagtgtttctaatgacaaaaggaaatagatattcttaaggtggagtagaatatatgtgttgggaataggtaaatgacaacaacttttgaaagaagtggtcgaccacaataataataataatttatttaaatttaggtgtaataataaatgtgaaagaggcgcgtgagaaagaagtggtttatagggtgagagaggaggaacccacgacgatccttaccaaaacctcagctacgcgtttatgggtcccactctctgtctcatctttttcttcgcccttccattattaacatattccttacaaacaaacccttcgtgttcctttctatttactctattgccacccccactcgtctatcttctttgaccacggatatttctcaagtttgtttcacttgttcatcttctttgtatttttttttctcgccaactagtattaaattactaataataagaatcactaaagctatttggtcaattaaaaataaattgatgcttttgatgccctttctgtgtattttgggcataaactaattaaaattatattcatatatctagtgattagtgcaaaaaacgtaatactaatataaatattgtaaaattatgaatttaaggagggcatttgtgttatttttcaataatatgtagtgtattcataaatgaaaccaacaaagaaaaatgggacaaaaaaaaacgcctagttattggttttgggaagaggtaggggcattaggtaataaattttctttattgagaagaaataaggcagagtccacgtgtttgaggacaaacttatcaatcagaaaaagacacgtgtaatttgacgataggaatggcgtgatgctgtatgagattgattattttggagtcagtcaatcgagccgactcaatcaactttggccggccaaaaaaaacaatttggaaaagtattgttgctcttatttaattatttatttcttttggggctattcctgatattttataacatgggggattggtgagatttgagaagaaagaaacccacaaaataatcagaattcagacacgaacaaacgagttgacctcaggtcttaacttctttgatactgtatgttatcataacagagacatagaaagaagcaaaaacaagcaacaaacatgcttcttcatctaaatttatatcaatttctgactcaaattctgaaactaatactgtattatcgctaatgtttagaactcgagacaaattggatataccaaacggttttttatatttttaggatttggatgagtgatagcttatcatatggctctatttttaggagtttagttgagtgataagtgataactcttattattacactgacacgatcaacacttctaacatcgaccgagctatagccgatttatttgcttccatgtaactgattgtgtgtcttcataccataagtttatcaccaaatcaaaataataggatctcgcgtaaccaatttctctaatttaagtaaatcataaatttcataaacaaacttgaaaataataaaaattatgtacaggttcgaattttgaaacttaagattgcgatagataggcgtacaaatttgaagctccacctccagaaccgattctcttcttagaagcttcatccatttccatattagatataactattaagttagtgtcctatgtattttcaaaaacctcatcaaatctatttgtctctctctctcaagcctcaactcaccacacaccaaaccaaaacaccagaaacaaaaagaaaagcaaactacaaattcctcatttcttcgatcgacaattggtagaatggtcgtaaccactcaaccaatttgagacgaaaccgaagacattttttgtgtaaataagaaacacataccactgaagaataaatactcatggagaattccaaagctgtttagttcacaggatcatgagctccatttgttgtgtctttctcagtttcttgtgcggctgaggacgaaccgtgttctgtgctgaccatatcactgctttgctgttctcctgctgtattggaaatagccttttgtttcagatatgcttccagaggaaacgctgcagcttggagaagcctcatcatgcttactcgggaagcccccgggtctgagttcaagtcgatgttttcccctgcggctagttcaaccgctggaatgctctccacttctgtctcgtccctgcactctgactgtgactgcgcctgctggcttgcctgtcctgcctctcctttgttccgcttccgcagcatgagcgtcctgaatcgtctcttcactgcctcgcacacagtgcaagtgcatgacggcttgtgtttgccttttccgctcggtggttggctgcagacgatgcacgaacaccctgcccggtgtcttggatgcttggtcgtggctgcaaccgtgatttccccctgttcaccggttgtggtgatgcctgcatttcctaaactattcagagcagatgcatcctgcgactggtttagcttttcgtttgatgatgccagtctcctccttttgaactctgttgagacgaaagtttcgttatgtaaagaaggaagtttctaattatacagaccaataatagctgcggattttacctttgctctgccggacaagtgtatcctgttctcttggagagagttcatcaggtgcggaacatgaagacctgacgatataaacagcaactcaaattattcagatggccagtctcagtgagtcaaaaatctataattatcccatatgtgtagtctaagttatttcggaaaaaaatgcgcaatgttctgtggtaactagcctaggttaaacacatgaacatgcaacctcgtttacctgccaggatccaagagattatcagagcacgaccactttggtggaagaagaatatccaccggcagctgtcgccatttcccacaagcatcacactgcacccattgctcttgttccctgagaattcatggatcacatatcagaaccaaataatcagatgttcattacttcaaatctttcgatcattccaagggtgcttaattcttctgatcctatcattacatagtacatgaggcctcaccctgtttgacgtgagacaaaaagggtcctcttcccgaaaactggtggttcctgggtagcagcaaatacatgatttcagaaaatacagtgaaaagttcccagctgtttttgataactaaacagttaacagtaactcacgtcatattcttcaaaatcttgattttccagcgtaaagatgctgggtttggtggattggggaggccgcaacagctcctgtgcctcctcccaagttattttcagttccagaacatctacgctatcaatgagcagacgcttgctcttagtcccaatgttccgaacccgtttcctagcagaagttaaggacgactgaagaaataagttatcctttgccatgtcctcagacttctctagtttagaccaattgatgtcaccacatcccggattcaagctgttggaaaacatgttcagattgggttcactgcttcccttgaacatctgaagaaacacggaaaaatatttcactgaaagaatcagtacgagagcaccagaaaaggattctttaattcaatacacttcacagtggcagttacttatgcctaagggggcaactctcagcttattatgcatttacctgtgtcgctgtagagttcgtcgctttacggtatcccattacgagttttccttcaggttctgtacggctgaatgttactgcagagaacatggaaaatccaagacatcagacctaatagaaaagtacggtcatctcttcgtggaatgtatttcactgtcctcatgattggaacgctttagtgccaatgtttcatttatccataccagggtgggtttatcaatatgttatgaatgtagttaacgaaacaaaaggatttgaaaagtaccagtgtcaccagcttgcaactgcatggactgtatgcaaggagtcacaccctccaaaacgtacatcctgctgttattattaggccaaaacctgaactggaacacccattctttcccttttatgtcttgtatctttaacgggagaccctcgggtagagatataggggggaaatatgcctacatagaagcatagacggttatagctgatacctggcatttagatagcaatagtttgggaatatcaaataagcgtacagagaaacaagttacctctgcacatgctttcggaagaaccagtcgaccaatacgacccgcatcgctcgcactcagaactttttcaaagagtggtataattttggaatttgagctaggaaaataaacagtcaaggactccttagcacagaaaaatagtgcataatggtagaataaaagcagaaacacgatattataacatacagatgaggatactgtccagataattgcagcagctcttggtcagtaatcctaggccagtaacggggaagcaattgggtcttcccgcgaccttctggaggaggccgagcgacatgaatctgtgacaccaggctcccactaggctccatgccagcagcaatgggagctgaatttgcaggttttggaagcagctgcctggaccgaggggccagttggaaaatcgaattagtcttacttctgtcatcaacagcagcatcatgaaatgggcttgtcataagcgtaggtccaagtgaaatgctcaagtttggctgtgcagacaattctttcctttcagttttgtgtctaagagcatctaggctggaaggaagcagcgattcttcttgtttcatttgaagagaagaatgagtggggtcgattctttgaaagtgaagcaagtgcttgagatttgtcctctcaagaacactgcctacatgctctgctgaagcaaatgaggggaagtccttaccgttagattcatggctcacattcatctgtaagagagattacatgagtatagtgacagagaaaccaagaccaaggaagcatcccttgcaagaagttaactcatggagaggaaattgtcttacagaaattagtccggatttcttggcgcaacttatacaggtaacaccaccattctctagaagctccatcataaatctagaagcaatgcatccacagtgaagacgctgaaaaaaacgtaaatacgtattaaggaaaacaattgaaatacgttgagtgcaaaaacatgtgtagtaagccatggattttcgtcaccttgtcacatgaattacactctctccaaccagattccttggcatggaacacttcacagaatatggattgctcgtatgcacacctatcaaaaaccaacattcacagagtttactaataagtaatcatgaaatatagattcccttcacgtacccactcttgttctaattgtaagcaaacccacagcactaatctatcgcagaagtgttgcgaatatcgaactggtcgcaaaagtattcaaattagacacaagagtgaaggcccttacccacacttatcgcagagagaagctaaatcaccggatcgcataggccagccttttttccactcgcccgacgtagaggccgctccgcacagtgcgttcatgcaaacctttattgactccataattgaccaattgagcggctcgattcaactgtcaataacttcaaatgaagcaagagccttatcgtattctccgcacgatggtgctttaatccaccgcaactttcctctttaataaaggcacaagcattaaaaatatgcaatgattaagaaaactaattggtatcagaaaagttaaacacttaccagaaaaggcagaagaagatgtcaaatatattgtcgagaaactcaatacgctccttctgtgaaagactatatacaaataaaaacatataagatgacgatatatagaagaagataccaactgttataaagtaatcaaaatccgtaaatgaatgaatagttaaggacatttgatattgacatctaaagataagatatcattgcatcctaaggaaaaaaaaacgaaattaaagttcacaagagacaaagaaaatcaacagacctttcgaagaaacttgtccaaaaaagagaaaccacgagtcacttccatctcctcagttttcaaccaaaccaattctaagcttagacatgtccacacgaaacttctcagtggtgcagtggagatggagcctcttaaataattgtgccactgtgataaaaacgcaccatcgaaaagttgactgatgaatgtatggaagtccaagaagtctacaatagtgataatgagaataatatcttgactgtgaaaaaggatgaattgattctgtagacaaaactaagtgcaaaccttaaatagtcaaattattcaattgaacggaaatgatccatcacctatctgagctacagtaggctaacaacgattccactacctaggcacaatttcaaggaagatataattcttattaaaccgctaaataatccaaaaacttgcgagtcagcaagatctaatctgaggatacacataacttttaatgctattgaaagaagaatatagacttgaagaaaaaaatgtaataagcagctacattaagtaaacaagtaaactaaatgtaataccttaacagagatgacagaaatgtatgcaggtttgtctccagtaacaggagaagatatttggctgcaattggaaaatacaaaaattaggtgaataacatgacatatttggctgcaattggaaattcataaagaaccaaggacgacactttcttaagaagcaataaaatgatatataaatcgaactagtttcattcttcttcaaatctttcaactttggttgacccaaaaaaccactgatttccaagtaaagcttataactttgtaaaaacactgatgtaaaggttcaatttttacaatcctaattccgaaatctacggtctttgaacaaaaaaaaacatgcataaatcaccaagtttctgaacactaatggccgagcaagtaaatttatcagagcataatcaccggagagggttaacccttaccttggtttgtgtggagagagagccgattgattcgatcggaagagaagggatagttttcgacggagaagtgaagttaaaaaccaagtcaaagtcgtctttacgtcgaccaagtgaagaagatttgagccaattcaattgcagcaacaagaggtagtggcaaagagatttagaaataacgaaggagttgatgaattggtttctaaataaagaagaagaagccacaatgacttagagcgaaaatctccattaccaacaacaacaaagggctcgtggagaagacaacaaatctggagcgttagattacaaaaaaaaaaaaaatgaaacacaaagaaactgctgacgtcagcctgacctaaaacccagtatgctttatttatttattatggatgagagaataatgtaaagtttactcaaagtgtgacattttatgtaataagatattaattaaagtgcacgcaaaaggtcatctctgtttcgacctcacctaaggtttgcttctagatttatatacgtctaaattagtattttgatttcgataataatattatttagtaaagcattgaatttgagaatgatgaagtggcttggtttctagggttataagacaggaacccacgacgaccatcaccaacacatcagcagatcagctactaggtccaactccaactctttatttttgttggttcaacaatttactgcaaaagacttaaaaaaatgtagcccaaataatcatgtcaggataatggaccgaagattggttgatgggccgttttagatcaaaaaaatcattccacctttggaaaagatctctttagcatattactttaaggtttgttgcaaatgaaaaatagttggaaaatattttagacccttaaaagtcttatccgataggtaaagtatttaaatcagttcatgggttgagtttcataattgaaactaggcatagattggccctttcctttctctttaataaatactcgattcatccctttctactgtctgtctcaatatctgtacataccattcattgtagcaatcactatacgtacatgttaatgtctatgaagtatgaacaataataagaattgggtaagagagttatatatgttgttgataaacaacagtgaattcaaaactatataatttagagagggtttgtatatccctttttttcctctgtatgagtaatgtgagaaccaattattcgtttatagatgaataataaattatctttctgtttatcgtaccgagttacctaccatattgcttagactggaaatgctttgttggtaaaaagacatgattggttgaaaaatagataaaagcatgaatgggattcaaaaactaacgataattaggaaactggattaccatggttggtaggctaaaccctagctattctaatcgctattacattctcacctactttgcatagtcattaaatttgcatatccacgaattcgtactaatagtttcgcagaaaatacacatgcaatcttatgaatattgcttgatttatttaagaaacaaacttgtatgcaattattggtatataaatcagttataaccgagccatttgtcaatatgactttgacacatgggtaagtctaaacaactaattcatactctagttatcaattgtctcttgtaaataatttagtacgtatttttttagttagtcttatagatgagtaaatcaccctttttaaaattattagattttcggttaaatgttttggattctaaactcaaaattaattagcaatatgtgatgaaaacccttgtagttatgtaattgcatgaaacaaaaatgatttcaaatgttattcatatgtactagatcttcaaacattaacacatgaactaacattttggaattacatcgatattcatttaattggatccaaaaggtttcaacttctcgttctgttattagtttttgtttcctcttttttgttttctatttattttcacatgttctagcttcttaattctaagctaacttgagtagcctaataaacttgtgtcacatgatgaggacatttctcaaatggaacattcagacatttacactcccatacgttgatatcatgttatttgctatattagtctaatattgttgcctttcagatttcacatatgaaatattccttgttgtaaccaagaaccatctctgtgtatttttacaagcataaaatagtagttgacaatataaaaataactatctgatgatgcaactctagttaatatatcacgaatcactgactcctatataatgtgtagatatactgtatatgtatcgacaccaattttacatacattaccgaagtattgattggttctttcatttgataaaagagagcatataatttcactttaatcacactcattatacatttgcgaaagtctttcattcacaaccgtcgttgcgtttagtttgctaatactttatgttagtgcccgttgagtttctaaaagtgtagaagtttttgttgtttatttatatagactctagttgcaaatgctgcatagaattagttagatccattctcgtgaatccttaagaggattatatgctagaataaaaatatactactaagaagatattttattgataacataattgaccaaagagaaaaaacaaaacggaaagtcttcttatttctgtcggtttgacacaactggtcaacttttgctgtcagtaaagtaaactcttcaagttacaaaggcatattttaacttgaccactctaaattttattcttcagaagttttagtagtggcccaagttacaaattcgtgttttgaataaattgttctaatttaaaatataagaaattcatacattgatcactttaaactgtttttggttaggaagaatttaataatttgtgttcactatcacattcaaaccctctcacatgttgatttgatgataaagaagttagagagaatgatttcgacttttttaaaacccactttctgcttccctcctttatgcagacaagaaaaaaggaaacaaaattttatgaaagagatctccattagagaaagagagagcgagagagagattaatcttggaagagcaatctcacattctcacactgctcttagaaaatctctctttcaccattaaaaatcccaaagagtctggagaaatgggaaagattcttcatcttcttcttcttcttcttaaggtctctgttcttgaattcatcattagtgtttctgcttttacttcacctgcttcacagccttctctttctcctgtttacacttccatggcttccttttctccaggtatctctctcttcctctatccatgcttatgtttttttttgtggattgatctgtgttttagtaaaccaatgaaaatctgacttttaattatatacgtaattgctatttttgagctgctgaatgagtgaattgctatcttctacgtatctctttatcagttattctgaaaattccttctcatctagatccctttgggataattcagaaattagatacagtgagaagattagctcaagcgtttgatttctgatttcagggatccacatgggcaaaggccaagaacacaagttagatgcacacaagaaacttctaatcgctctcataatcacctcatcttctctaggactaatacttgtatcttgtttatgcttttgggtttattggtctaagaaatctcccaaaaacaccaagaactcaggtaataatcatcttaacattaagaatgagaacaaatctgcaaaactttacatttgtaacaagattctgtatcagtttcttcattgtgatctctctgttttgatatctaaatggtttcatgcggaagaaggtgagagtaggatttcattatccaagaagggctttgtgcagtccttcgattacaagacactagagaaagcaacaggcggtttcaaagacggtaatcttataggacgaggcgggttcggagatgtttacaaggcctgtttaggcaacaacactctagcagcagtcaaaaagatcgaaaacgttagtcaagaagcaaaacgagaatttcaggtaccaaaacaaaacacaagtactaatcatttttacttttttaccggattcttgatatctgattttatcatctaaatctcagaatgaagttgatttgttgagcaagattcaccacccgaacatcatctcattgtttggatatggaaatgaactcagttcgagttttatcgtctacgagctgatggaaagcggatcattggatacacagttacacggtaaaaatagctcaaaacatcttctcatcatcgtgtaatagatcatgagttaaattaatactatagtataacagagataaaacaaatcatgtgcccacatgaaataaataatttttgttttgataaaatttaatgtttgcatcattaatggttaaggaccttctcggggatcggctttaacatggcacatgcggatgaagattgctcttgatacagcaaggtactacactcaagtgcccacatttaacaatcctctctaccggttgattaatttcggtttaggtaaaccgttttcttatgttggtttggaaatagagctgttgagtatctccacgagcgttgtcgtcctccggttatccacagagatcttaaatcgtcaaatattctccttgattcttccttcaacgccaaggtaaacaacttgaatcattaatgatgattctgttctgagctaaccgaacaagatttgtttcgttgattcaagaatcatttcattcatttgtctttagttccatctctaacgatagatcaacattcagatttcggattttggtcttgcggtaatggtgggggctcacggcaaaaacaacattaaactatcaggaacacttggttatgttgctccagaatatctcctagatggtaaaatattaacatttccctctatattgatcgactttgactcgttgtcatatcactagagttatagcacatagtttgatagtcataatcatgtgaccccataacattaagtttctttcattacgtctaaaattgttgttctaaatcaaatcattttgtttgttgatgtattatttcaactaatcacacatagaaatcattatttgattagagatggtagttgttgggtcgctaaaccggtttattgagtttgtctcattgcaacatctttatgtccctcaggaaaattgacggataagagtgatgtttatgcgtttggtgtggttttacttgaactcttgttaggaagacggccggttgagaaattgagttcggttcagtgtcaatctcttgtcacttgggtaagtccggtttgtgttgacgttattgccatcaatacatgaatcagatagcattggttaatgagtgtaccgtttcgaaaaatttgcaggcaatgccccaacttacggatagatcaaagcttccgaaaatcgtggatccggttatcaaagatacaatggatcataagcacttataccaggtttgcgtcatcttttgtctttgtgtttaggcttaaaaatccgattggttacatattttttgtgttgaaacgtaaataaaaccggaaataaattgttcaggtggcagccgtggcagtgctttgtgtacaaccagaaccgagttatcgaccgttgataaccgatgttcttcactcactagttccattggttccggtagagctaggagggactctccggttaataccatcatcgtcttgatttaagaaaataatattttttgcttctttttttgaattttacagtttgatctctgattgctttgagtaatttaatttgggggtgaaaaatgtgaggacagaagggtattcacttgtcattattgtatttgtaaattgattaatatataaattgtgttgtcactaagtgtaaatattcaattaattgttgcatgaaccactaatcacaatccactagtatccatccatccactctttcaacttttaaacataatcctaaatgactatcttacccctatcaagacaagcctgagaagtgagaacaacttcgtagacatcgtcgtgtctctctctcgttgaatccttgttaatctttttcttcaatctctcgatctgatcgttatcgaaaccgcgcgattctaaccaagtccaggtgacaaatcagctctgctaaaatactcacaaagtctcgtgatcatattttgtggatcacatcattgtcttatttttggaattgcttatcctcgcactagttcactgatttgagatctgtgcagttaattttgtgctccatagcgattccatggcttctttaatgttatctctcggttccacttctctgttaccgcgcgagattaacaaggtacttttcgccgttctatcgagtatatggtagaaattacgcatcagtttattcaaaatcttacttttttgttttcgattaaacttgaacaggataagctaaagcttggaacttctgcttcgaacccgttcctaaaagcaaaggtactctcttttctttgttagtgctcgaatctgaaccatatgaacaattttgaatgacgttttagagtgttattagtctaataagtgtagtttgtatctgaaatttgtggattttggtttcagtcttttagcagagtgactatgacggttgcagtgaagccttctcgtttcgagggtataactatggctccaccagaccctattcttggagtcagtgaagcattcaaagctgacactaacgggatgaaactcaatcttggtgttggtgcttatcgtactgaggaactccagccttatgtgcttaatgttgttaaaaaggttggaacttgtaactctagttaatctcgtatggctcttttcatgtagttaatttcattacttgtcgtttctaggcggagaatttgatgttggagagaggagataacaaagaggtaacttggtttatttcaaattgtgcaagcgattacatcatcagaatatcactaaattatacctcacatggatggaacttgcagtatcttccaattgaggggttggcagcattcaacaaggctactgctgagttgctatttggagctggtcatcctgttattaaggaacaaagagtaattctgcatcttttgttcatcatgttattaaaatgttttctcatgatgttcctgtttctgagctaatccatttaccttggctctaaatcaccaggtagcaacaattcagggtctttcgggaacaggttcactgcgattagcagcggctcttatagagcgttatttccctggagcaaaagttgtgatctcatcaccaacctggggtacattgtcttgaccacaaacatttttgagtgatttggtttcatatttaaccgcctttatcaactgtacaaaataccacatcaggtaatcacaagaatatcttcaatgatgccaaagttccgtggtccgaataccgctactatgatccaaaaacaattggtttggattttgagggaatgatagcagatataaaggtttgtttgtcctagaaggctatgttttagttgacattgctttatatatgcatcaacaaacaggatatcatttatgtgatgccaaagtgagtatttgtttgcagttatactgtctgtgtgataaaacgagtacttgtttaaagacaacgtgaaaccctgatggattataatggttaatcttgaatttctgttatgtaaaatgtacaggaagctccagaaggatccttcatcttgcttcacggatgtgctcacaacccaactggaattgacccaacaccagaacagtgggtaaaaattgctgatgtcattcaggaaaagaaccatatcccatttttcgatgttgcataccaggtatccccctattcctacatttccgaatatcgtgtttccgagagaagtaagcgaaaccatattatgtaacgctacatgcacctattttccagggctttgctagtggaagccttgatgaagatgcagcatctgtgagattatttgctgagcggggaatggagttttttgttgctcagtcatatagtaaaaatttaggtttgtatgcagaaagaattggggcaatcaatgtcgtgtgctcctcagctgatgctgctacaaggtaaaacttactctaaattttcttatcatgagcctgttgcaagtgatcctggagtctcagtttctatctttaccgtcacgaaccatatctagctacaggttttatggaacctttaccagtaacactacttgctttcagggtcaagagccagttgaaaaggattgctcggcctatgtactcgaatccaccagttcatggggcgagaatcgtggccaatgtagtgggtgatgtaactatgttcagtgaatggaaagcagagatggaaatgatggcaggaagaataaagacggttagacaagagctgtatgatagcctcgtttcaaaagacaagagcgggaaggactggtccttcattctgaagcaaattggcatgttctctttcaccggcctaaacaaagctcaggtatgccaacaattttaatactacacagattccctttggccttgtttagacttgtggtttgaagtttgtgctgttttcttttggtaacgagcagagcgataacatgacggacaaatggcatgtgtatatgactaaagacgggaggatatcattggccggattatctctggccaaatgcgagtatcttgctgatgcgatcatcgactcataccataacgtaagctgagcttccatctcagtagatgacaataagaaacagttttatataccctttttagcttcttcttgatctttgattgaaaccagatggctaaattaataagctagcatcacactatgattgctagacaattttcaaggaaacttttgatttgatcgtgtttgacaggccttgttgtattgggagactcccatcgagttatagaagaacttgttacgattgtattttacataatttcacaactatacttgaccggaagagttacaacagaaatgatcagattgtacagtgtgatctatcttaataccagtgcaattccacattgtctgctataagaagcatcgactcactatcacattatcaaaagattcaaaaccactagatattaaaaccagtacaattactagcaagaaattctaaagcttctagttcgcaagtagatgattaaatttaaacccaatccagattctaggttgcgagaaaaaattcttaagaaacaactctacatggaagcaaaccaagagatacttcaatagtcaaatcacacaaatgttaagaaacaactcccaatacgaagaaaatttggtaacatgaatcataatagagtaaaagtcttacagaaatatgaaaatgtcataacttaaaacaaaaagaagacttgaggaaatgctaaaccaaacagataaagaagactcttttagaaggcttatcacttagaatccgagcttggttctacgccagtgcctgcgcttggcattgtacctgaaattaaccacacaatgaaatcagttttagaactaaatcgatcaactaacacaactaaatatatcttcaatttgatagatcagggaataaacaatagacaaaaaaaaacaagaatagtcgaacctgatggtgttgtcggtacgaagacgaatccagtgaggaataggcctgttctgtctcatcttctttcccaacttcttcttaatcataaacgacttgtgcgacggctgttacatttcatttttccaacacaaatcaaaatcactaatttcgtttcgatatctaactaacaacaaatcaaactctttaatcaatccaaacaggcgaaactaacaaacgattgtaacaaagattaaaaatttgcgagagagcgagactaaccatcttgaagtcgtgagattcgcagctgctcagcgaggcaaaaaatacgaagaagaggcgactaacctttttaagaagttaaaacgatgaaaccctagtaaagtcttctttattgggctttttatgtgataacagtctttttaggtttcatgtttcggcccaaggcccatgatttttagtcttgtagcgaaacgtcaattttttattggtcacgttcccaagtttgacacttctacactcaagaagtcaacatttcttacaacgaaatttcctgttgtaagattttgggggaaatggctgttctacgaaagctctgatataaccttttgtactcttattgatttacaaatgtttgtacttgctcgtaggacgtgattgatcctagagcaagctttatgtctcacatgtctgtgaaacaaatagctgttcttttctatcactgattttgacatctgtaggctctaaaaacacactacttcttcttgcaattgtacattgtgtgcttaataggttccaatcctagtttcaagcatcagttttagtcactttagttatttactatataatttctttgtttgcgtatcttgcctggaactgttgttagtgtcacttctacaccaactggttcttttaagcagtgccatctcatggatcattgtgaaaccaaagataattttgacacattaagatacagagccaaatgtttagttttattgaccaatagacttattacagagccaagatagagcatacggactgtatgaaagtgagaaggagaagaagtaaagctgcaaaaacagaagcaactgcccaaggattgtggaagtagtcacgtctcagaatcgccttccacctgttccatggtgtgttgcagtaagcttgaaggttctcagagagcatcgaaaagtagaatcttctgtcatagataacctctttgctgatgctattgaacaagtttgaaacatctactgagttcccgagatagtttacgatgatcccactgtggatgagcaagtcagcatctgtaggggatttaatgaagcaaccgagcagcatgatgtagtcgaggaagtttttatttgagcaacgacattgttcaaacccaatgatgtttttgtagagggattccgtgagatcatcgacgacaatggttggaatcttcagtactccatcagcaaaactaatgtcaagtaaacaactactggtctctgctggcttgaacctaacaccagcagtgtgaagctctgttgcttcaggtgcattgtccactttcactgtagtgtattctaatttaattggaaactgtggcagataacaagacctcagaagatcaacaaaatgttctggctctgtaataaacttctcatcatcaatgcggctcaagaaataactgaagtggcgttgcgcgagctgtatgattgaaggtgttccttgttggtagtaattcaacaagagaagaaatatctccttcacaacgaaaaagggtaactgattttctatcaaaatcatgtcacggcacacgtcggtgatcatcattgaattgccaaatatgcgatcattctcgcctctaagtcgaggataatgagacctcaaaagaagttcaaccaagaagctaccatctacaactaacatctcaacaaactcatcgctatgaagtttcacatcttctgcataacagctgcgagcattttgttcccaagtcctagcaagtctaacaaggtcctctagactagagttcgttctagggataaaactcagcaaatacctgtatttctgatcttccatagcttgaagctcttctttaccacgatgaagcgggccaaaagacacaagccgaggcgtatatgcatcaggattgagtctgcggagcttattaggtaccttgtatatacagcatttggtggaaagagaagataaaaaggctaacttcgctttgatggaatcgacaagggcgtcaccttcattctgattcatcctctcatatgcaaagcaaagccggtctacaaagaaagagaagaagaagattctccaaacgaagctaagcgcacaaacagtggtaaaccttgcagaaagtcaacgtttcacacacattcttttggactttaagaaagacgcttgcagacatctcaaccccaaaaatatcaaacgtgggtccaacaagtactgctaagctttgtatacttcatctttaaatagttgattttaacaagacaaaggaaagctttcgaaagatgatttggtggtgaggttggacaataacatttttagttggttgtatcattaatagatggtgtcgctgtgttatccatttaatccaactattctatcaaaattgtgaaccactagcgaattcatcatggtcaagcacaccagggaaaacaaaagagcataatacaatggagatattctgccaaaaaaatcactcccactgcctaaaaaagccagcttctgcagatgaagtgcaatcgagagagatttcttctgccgggtggaatcgtacttacgacattgcacttcactgcagaagctggcgttgaggtatctcttagatgataccaagaatgaaaacaagattgtgcacaagctatcagtcacaacttttataagaaataagttaagccctcggatttgaaatattcatcaataagatatcagactacttttaaccattaatatattattaatcatcgaagggcacatagagagttaagtaaacaaagagatggcgcaaaaggattgaatttagcttagctgatagaatccctcagaattgactagtaatcaaggtataatcagtcactacttttaacatttttttcatatcattcatcattgggatgcagctaaggtcgtgtgcatcaatatgcttcatcaagcaagcaaaagcaaaaactcaccaaattaacccacaatggatgtccaacaacggaatgtaagaaggaaacaaagaacaaatcaaatccctcagagctaaaatttcatcaaaagatatcagtcactacttttaacatttttaatcttaataagtcatcattgggattgctataacgcttcaaatcaaaaaacaagaacctttaaacctaaatctgagaactaaccaaaatcaaagcctaaggaatcccacttcaatcaaaatggcagagccaacagtttcaattacataacagatttcaacaaatataaaaaccagaacgataatgaaatagcaaagactgaaatctagaaacaaaaagcgagaaatagaacagatcttatgtatgcgagcttttcacaggaacggtgaattagggttccaggggaattcgttgtagctgcggaagagtgtcctttgataggtatttatagtgagttgtgttctgaaaaggtcaaactagggtttatgccacttcctggttctgtaataaaataaaataaaattcattatttttttatttttacgctcatcaattttttttcttttaataaaaactctatttgtgaaaatttgggacttattgcttaagaattaattagaaatttaaaataaaacacttgttgtttccaaaatatttagctattttacttcgatttgttgatattcaaacaagtaattcgtacaattttcaaaattttacatcaaaacataacaaacaaatgttgaattcactctacagttagtatctacagagagagattcatgattctcctataagtaaattataccaagtataaccaaacgaatggaggatatataacttgagaacaaagcacaagcaccaccttcgcattcataaacaagtatataactagcagctgttcaaacaatgaaaaataatcatgtcttgacgcttacgcttggaggattttgatcttcagctccagatgcaacagaaggaagtcgaggtctcaaaggacaagatggagaagcagaaagaggaggattacccgttgatattgatctgttatgtgtaggagtattatctaatcttgcatttgaagaagacgaagataaaggacctgatcggcttcttcgtattttcttcttcctcttcttcttcttcgtattttctccttccaagagcagcttcccgtcttttcctacccgcttcactttagtctcgttcaagcaagccggcaagacacagttgcagaggaaaccttaagaaggttcaaaagaaaccaatgtacaacattacttatttgatcccctgaaagattctattgtagaggaagttttgggttacctaagcgagcaagacggttgacccaactagggattgatttgtgagtaagtttcaaagaaacatggttgcagaaatggttgcagttccttgtgatgagatggtacttgttaccctgatactcttctgataatttctccataaagcttcgaacttctttagccttcatctctgtttcaccaacaagaatcgatttcctgaatgtgaaaccaggacacttctttggctccacctcaaaaatccccgagctcgatttctcgtgtgccccgtatccatactcaaccccatgaactacaaacaaggaatagccaaaaccacgagagaacattcaatataggattaacaacaacgtatggcgtgtgtgtgactgagtcattgttcaaacaacggccacaaaactctaccctcctaagttgttatcatcaaaacacatttagtctctaaatcgattctatgaccaaaagtcaattctactctttaacaataaatagttttcatcgatcaaagcagactttagaatcaaacaaagccaagcaacaatacagacaatggattttttcaacaattaatattacaatccaacaaaattgacctactattgtctcatctttctccgcaatcttagaacaacaatcaaacccagaatcgagaaggaaaaaaaacgatttaccttcgagaccagagtgatagatcccaattccgagccagtaaccataaacattcattggggtaagatcgtaaacattcagataaaccggtaccgtaccagaattcttcttccgcctcaccgatacgtttctgcaaaacatctctctctctctctctctctctctctctctctctctcttttgacggcggctcaatgcatcgcaaataaatttttaaaaaatcgattgagaggtttcgagcaacggagaatcggatgctctaccggatttttaagggttcgacttcgtcttcgtcagtttcttcttcccctctctcggggtttcctggaaaattcgatcgatgcctaaaaagcttatttacttccgtttctgttttttctttttttttttccccaaaatatttccgcttctgttaatttacaaagttcaaaattgaaaatgcagtttgtttgtgttttttttgccgtcaaatcaaatatattatattatacaaagttttacacaatagatgaaatcaaataatacatatattttaaagaatacatttggttccacatttatttattttaaaaaagtacacaacgtaacaaacgtacgttttattcaaaataaaattaaaaaaacaaattaaaatgcaccttcaattaccatattgaagtcatatagtatatgtttctggaacagagatcacacataaagcccttccttaagacgtggactgatcagaatctcaagaggcgtggctttaggaatggttaagccagggctctcagtcatatcaacaggcatatccataacagttttcacgtcaaatgattgaaggaaacgagcaagacctaaatgaagcacttgcatggccaatgaagagcctgggcatgatcttcttcccgaaccaaatggcatcagctcaaagttttgtcctcttacatcgaactcttttgcttctcctgtgataaacctctctggtcgaaattcgtttggctccatataaaccctcggatctctttggattttccatacattcactaacattcttgtgccgcgacgaacgttgtaaccagcgaccgtgcaatcttctatcgcctctcgatggcctaagagaggaccagctggatacaatctcaatgtttctttgataatcgcttgaatatacaccagattttctatgtctgaatcctcgacgttcctgtctctgccgacgtggatgtcgatctcatcttgtgctttctttaacatgtccttattgtttagaagaagagaaatggcccatgtaagggttgatggtgaagtctcacttcctccaagaatcagtgcctgttattcaatttattatcattatatgacatacattaaaacaatatacttataagtatcatctaatcaggattcgcctaatcccatcaatttaaggttgaagtaatttcttacaaaataaacatgttatcatttacgtctttccacctaaacttgtttatataactaactttgtattttagaaaacaataatttttggacaaaatcccagttaatttggttaggtttatatatctagttcatctaaaaaacatcaaaatttgtgtagttaaagatgtaccaggcaggtagatttaatgctagtaattgcatcatgttgaagatgcgagaatttgccttgttctgcaagcgacagcataacgtcgacgaagtctgaatcattgtgtttcgttcctgaaacttttcgttgttgtcgatggttttcaatccatctttcaaggatcacatctaattctcttcctgtttgcttcatctccttctcatgtccttgaaaatcaaaccaccctagtttcggaaaagcatcggacacggtgaatataccgacgaggtgaaagaaatttgcgacgccctttctgcattgccttgcctcttcggcatcttcaggggataacgagccgcctccaaagtatcgctttccggccaccattctcaccatcatgttcagactcatatcctctaaccagctctttagatcaaccattactggttctgaaccacctttcttgacccacaaggaatacaaatcttgcataactgcatgcatgcatgtgacaatatgtcaatatcgcatcataacaaaattaacaatatcgaaaattattattatatacgtttttttttttttttaattacccattgagatctcagaaacacggacatgcttgagcatctgaagccgccggttagaaagtagctcgagggttgcgattttacgcatctcacgccagaaagcgctataaggcgcaaacccgaaaacagcacaatcgtaacccatgtgctttgcggctgcagtaataggacgtgaagccaaggctttgtcgttcacagtaaaacaatctttagccacctcaaaactgctcacaacaaatgtttcactgctcccaagtcgtagcgacatggctggaccgtactggtcagccatttttcctaaggttcggtaaagaagctgttccttgccactgagaaggtgaagatgaccgatgatgggccacgcaccacttggtgcaggagcttttacatgttttggtttctttgatttcttaaaaagagcaataaaaacgaaaacaaggattggaacaaataaagaaaagagggaagtatccatagtggtttgagcgtgcaaaagagatgtgtgtttggtgatttctagttttgaatgattaaaaagtatagtctgtctctctatatatacacacacatattatcggttcaataccatgtaagcatgagacatacgcctatcttactgctgtttgaccaaaagcaagtcgtcgaaaggcgggggtcgcaaattgtatatggtcaaaaaaaatcgatagttactgacgtacattttgaaataaaaaaaatggtcgaacatttttgaacatttctgaatatttttccaccatttatcttaaccaaatattgaccaacgttatctacttgtgtttagaaatattatataacattatattcaaaaaaaaattgaaatgaagatatgactttataatactgaattcataataataactcaaataaaaaacatgttttaaaagataaaataaaaaatatattaaaacacaaataatttaaaatacactaattatatttttttgtttttgtatgagtttaaaattcaaaaacggttttacaataaattcaacataaaaccgagaaaattttgaaaacttaatagaacaagatttaaaaagaagtgggagctctgagttatggggcatttaattctttccatagattgtgtatagtgagttgaaagacatatctaaacacaaacaaatgaagttgtggagaggaaaaggtcgtagatagggcaacaagagaatcacagcaagtcgtgaagcgagagccgagcatatatttcatagtaagagctgaccaagcatgagagtatgaacaagagaaaaataggtgatctcttgtttctatttccgtttgacaaaacacactaccaccatttgcctcgccattccactttaataatctctcttttgtggctagacggttctgtatcgctagccaagtcattaaatgaaagttcagttgagacagcctcaaaaatacactaattatccatcaccataatttaactcttgtcaagctgcctcgagaaaacgagcatgactatgaccgtgcacgcttgtttcatacaacgattactgcaactttaaaaaggctcacgattagtgaagaaactgcgaaccttcaagcgagaccttgagcgatttcatcaacgatttcttttgagccctctttgcctctaaatcgatctgcttcccaagatacttccctcaagaacgaatcgggtgatccttgcaccagttcattgttaatcgagaggagaaatactgtgaaacatacatatgtagctctgatacatcttctttattgttgcgactaaatgatccatatgtgttctttttacaaggatctggacgaacaatcaaattggcttcgtgtgggtaacacaatgaacaaacccatgttcaaacatcatctccgcaaaattttgattcacttgctaacatcaattctacatatagaactagctagatcaaacgctatgtgtacaaattacaatgttacttttttgttgttatagagtaatagtatattagagaaattgatgagtaataaactgtgtgtgggcaagaagtgggccttatgttgtaaatgataacagaaacaagaaactgttcaagtctcaggacgaccagagtgatgaaggtaaatgtccagtgtgtgtcatgggtaactgattaccaacgttaaagggatgctttagctcacttcggtgaagtcgtagatggtacaccattgttcaagaatctttacctattttggtatatctttttccatcaaggagaaccccaaagaatttctaaaaaagtaattaaaattttttttttagtaaaaaaaaattgaaccaattgaaaaaaaaaatgtcactatgagttgtatagagtatttcaaaaaaattcaagcgagaatttttttactttttttctcttttattttattattttaattataaaaaactattaaatattgccaatagaaatggtataaataagagttttgtgatatttttggtctctcttgatgaacttaagtttcctattttaattattgtgcagtttaagtcatggatgatctgcagaggttgctcccccaatttgaagaggtcaagtttgtgttcataccaagagagggcacacattggcagagtatcaagggagtctctttcatttttgaattatgatcctaagctttattctattgtgcctagttgggcaagaaatagcatgtattaatctcattatctaagaactttggataataattagttgttgttgagaaaaaaaaaagtcatggatgatagagagagacaggaagatggagggtttttgtaattgtcaactgtgtccataacagagatggacgcaaaggtttgtattgattttgttagtcaatatatcttttaatggtaattgtttcttttaatggtctggtttgactgctgacatttattcattttcgtggaattaatttctgattataaagttctaaactataacatggttgaaacaaaacgcttgactttagtgggtttttctgttttttgttttttttgtcgacttttcgtttttgtttttctattcacacaatccattttctctatttcaacatggattcttaataataatcggttgtttcgttcagcacgtaactttatatgtgatataaaaaattattggttttaccaggaaaggatggcgaggaaaaacaaataccataccacatacacataaaacaaatttcgcccgcctaattagcgtgtaggcaattcatgagattgcttttttttaatacattggcagttgttgaaaataaattttaagaatgttttattggaagcttctcatatgcttacaggtttggttgttgatattagcatgacctccactgctccgacatcaccttcaagatctgaatccagacagcttcaagatccctttggagaagtcgaaacgaagactcaaaacgacagtgtcgtgagtaacaaagacaaaggcctattgggccagaagcccaatgacaacaaaacaataaaagagctgaagcccaaatctgctgtgtcctcttacatcagccaacggtcgatcccacctgtacaagcaaacaaaaccagagtggatacaaggaagaggagcgtgatgaagggctgtacggatccaatcatcaccacaaataggtttgattgtctggcaacctgcgagacctaataaggagtgagacaggtgtcagtcttgatatgtgtaaaaccctagcattgtttagctataaaagggaacctatgatatatcaaaacttcaagtgaaataaaacctaagaaatgttcactcagttcttaccttagtagccgtttatctcttgctttcagttgagagatcatattcgcactaatctttttgtttgcttaaatttaatattttcgatagactaactgaataatctttctttaagatgtattagactaaaatatacaattcaaaacgggtatattatttaaacgcaaatggttttgagacgaaatctttttgacgagtataggactcgacgggtttcatgtccatttcgggacatgtctactttctctcatttttatgtagttgtctttactgataagagcagtctatcggtgggctcttaggtggcccttatttgtgtaaaatataaatgtaaaattgggcttaatattaagagttgcttcttttgtgagaggcccaaacccttctaagaagcggtgacgtggcattttgaagggtaaaatattaaagcaaaaaaaattgatttgtttctcctctctctctgttacgcggttttcttctgttacggaggcaaatcggaggagcgtttgatgtttatgacctccggccgtccttctgcttcctgattcttcttattcttcctagacttattttgagtaaacctcacaaaccctaatttttgatcggaaccgcttcgtttccgattctaggcacattgggaagagatatcgcgaggaaggaaggtttggataatgagaaggcgggttcactggctccgtcgaccagttctaggaacattgggaagagatatatcaagaacaaaagccaccgtctcttttgacgagaaagatcttaagtacaatagaaattctaactttactgctgattcaatctaggtatctttgaattcgcgtgattagtgagttttctgttgtgtgttgttttgttgctagagattttgtgagtgacgttagaatcctctgttggtcggtaattgagttttcagttaacggttgtaagtttgtgttgtattaatccaaatttgagtgccttgagcttgttctgattcgtttgtatagaaatttgagtgcttcttttgttttggctgctaatgttaatccaaattttacatctttctcattgtctgttatgtatgagtgattggtaatggattatatgtcagagagattgttgatgttcagtcgtttgtattatgtatattttgattcttgggcttgaggttgtcttttctcatattgttctgaatctggtatatgagctttgcataggaaatttagagttaatggttgctggtcgtggtgaggataatgaaaatgaaatggggataatattgaggaagatgaagaggatgcagaggatgaataagcagagtctgatgcttcaacatttggtattattttcataatcttatttgttcttgattacgcaatgattgtagtttgtcgccataacttgaaagctggttgattggaatggagaagtttgcaacacaagcaatattgattgtctttttctccattgaattgcttttgcttcgtatgattttgctttgactagctttgttctgatatttgttaacttctccattccaatttggtgggtttatgaagttgatgacgattacgattatatacaactttgatcctaatttgtattatttgtatcacaaatttcattttgattcaaaaataaaaaaaaacgctaagagccccactttagagtctaccattggacagttacaaaactaaaaactctaactttaattttttttatttttttttcaaattctatattaaaacaaatgctaagatggtcaagtgataacaaaaacatgtctgatcattgtttcgtctaaaccgaattgaaaccaaagactggtgtgagtttgaaatatgaataccaatacgtctacagacataacttagcataaatgtgaagtccgaatctagttaattttaaagaggaaacaacaaacgaaggttttaaaaaaaaaaaaaaaacacacacacaaacacataaaaaatgcacttcaatagccgtattgaagtcaaatgtttctgtaatagataatcacacaaaaagctctctcttaagacgtggattgatcagaacctcaagaggcgtagctttagtaatggttaagccagggctctcactcatgtcaacaggcctatccaatacagttttcacttcaaatgaatgaaggaaacgagcaagacctaaatgaagcatttgcatggccaatgaagggcctgggcatgatcttcttcccgaaccaaatggcatcagctcaaagttttgtcctctaacatcaaaatcttttgcttctcctgtgataaacctctctggtctgaactcgtttggttccatataaactttcggatctctttggattttccatacgttcactatgagtcttgtgccgcacggaacgttgtaacctgcgaccgtgcaatcttccatcgcctctcgatggcctaagagaggagcagctggatacaatctcaatgtttctttgataatcgcttgaagatataccagattttttatgtctgaatcctcaacgttcctgtctctgccgacgtggatgtctatctcatcttgtactttctttaacatgtccttattgtttagaagaagagaaatggcccatgtaagggttgatggtgaagtctcacttcctccaagaattagtgcctgattattcaatttattatcattttatgacatatattaaaagagacaattatcatctaataacgattcaccacgtcacattttaggttgtaagtgatttctcttaaaaattaagtacgttccaattacgtctttccacctaacctatctagttaatatctcgttcatataaccaagtaaccaactttctatattagaaacaataagttttgggtaagattccaagacaatttggttaggtatttatatctagtccatctaaaatacgtcaagatttgtgtagataaagtgtaccaggcaggtagttttgatgcacgtattggcatcgtattgaagatgcgagagtttgccttgttctgcaagcgacaacataacgtcgacgaagtctgaatcattgtgtttcgttcctgaaactttgcgttgttgtcgatggttttcaatccatctttcaaggatcacatctaactctcttcttgtctgcttcatctccttctcatgtccttgcaaatcaagccaccctagtttcggaaaagcatcagacacggtgaatataccgacgaggtgaaagaatttcgcgatgccctttctccattgccttgcctcttcggtatgttccgaggattctgcgccgccgcctccaaagtatcgctttccggccaccattctcatgatcatgttcgcaatcatgtcctctaaccagctctttagatcaaccattactggttctgaaccacctttcttgacccataaggaatacaaatctttcacacctgcatgtgacagtattgcatcgtatcacaattaacaatatcgacaattgttgttatataagtttggtacggtagacatggtttttttaaattacccattgagatctcagaaacacgaacgttgttgagcatctgaaggcgccggttagaaaggagctcgatcattgcgattttacgcatctcgagccagaaaacgtaacccatgtgctttgcggctgcagtcataagagaagccaaggctttgtcgttcacagtaaaacaatctttagccacctcaaaactgctcccaacaaatgtttcactgctcccaagtcgtagcgacatggctggaccgtagtggtcagccatttttcctaaggttcggtaaagaagctgttccttgccaccgagaaggtggagatgaccaatgatgggccatgcaccacttggtgcaggagcttttacatattttggtttctttgatttcttgaaaagagcgataaaaacgaaaacaaggattgaaacaaataaagaaaagagggaagtatccatagtgttttgagagtgcaaaagagatgtgtgttggtgatattttgttttgaatgattgaagagctactacaagaaaactatcccttttatactatgaattaggtcaatagattggtcaaaaattggccatttcttactatgtttgaccaaaagcaagtcgtcaaaagcgcgtgtcgcaaattggatttggtcgatttttttttaaaattactgacgagtataagtggtcgaacattttgaaaattaaaatggtcgaacttttttgaacatttctgaatgattttcaaccatttatcttaaccaattcttgaccaattatctacttgggttttgaaatattatattattatattcaaaatattgaaatttagatatgattttataattctgaattcataataataactaaatcaaaagtaaatgtcctaaaacatagaaaatctaaattaaaacacatataattaaaaatacactaattatacatcaccataattaactcttgcaagctgcttcgacaaaacgggcacgaccgtgcacgcttgtttcatacaacgattactgtaacttaaaaaggctgatgaatagtgaagaaactgagaatcctacaagccacacaccttgactccttgagcaacagagcaatcaagaatgtaggcaacttttttttttttttttttgaaaattggcagttggaaataacttttaaattcttttattggaatgttcagtaagtttctcacattcttgcaggtttattattttcgatagagtaattaaatagtctttctttaagatttattagctagactaaaatatacattccgaaacgaatatattatttaaatgggaatggttaaatgtggtggaaaattcttgacaaatatgggtttggacgggtttcatgtcacgaaatagacatttctactaattaacaaaaaataaaattcgatcactcgttttatctaaaccaaactgaaaccaaacttaatactagactcatttgagttcaaaatataaatactatattaaacaaatacgtttacgaacataataccgcacaaatgtgcggtttgaatctagtttattttaaagagaaaacaaacaaacgtaggttttattcaacaaaagaaaaacacacacacatcaaaatgcaccttcaataaccgtattgaagttatatgtttctggaatagttaatcacacaaaaagttcttccttaatacgtggactgatcagaacctcaagaggcgtggctttaggaatggttaagccagggttctcactcatatcaacaggcatatccataacagttttcacgtcaaatgaatgaaggaaacgagcaagacctaaatgaagcacttgcatggccaatgaagagcctgggcatgatcttcttcctgaaccaaatggcatcagctcaaagttttgtcctctcacatcaaactcttttgcttctcctgtaatgaacctctctggtctgaactcgtttggttccatataaactttcggatctctttggattttccatacgttcactatgagtcttgtgccgcacggaacgtagtaaccagcgaccgtgcaatcttccatcgcctctcgagggcctaagagaggaccagctggatacaatctcaatgtttctttgataattgcttgaagatacaccaaattttctatgtctgaatcctcgacgttcctgtctctgccgacgtggatgtcgatctcatcttgtgctttctttaacatttctttattgtttagaagaagagaaatggcccatgtaagggttgatgctgaagtgtcacttcctccaagaatcagtgcctgattattcatagtatatttatatcacacacattaaaagagtcaatatcatctaattaatctccacatcacattttaggttgtaattgatttcttttaaatatgacccaagtgcgtctctccacctaacatttctagttaaacttatatattataaaacattatattttgggttaaatcccaatttggtaagtattttagttatctcatatttttttcttaaaaatcaagatttgtgtatagaaaggtataccaggcaggtagatttgatgctagtatttgcatcatactggagatgcgagagttttccttgttccgcaagcgacatcataacgtcgatgaagtctgaatcattctctttcgttcctgaaaatttgcgttgttgtcgatggttttcaatccatctttcaaggatcacatctaattcgcttcccgtttgcttcatctccttctcatgtccttgcaaatcaaaaaaacttagtgtcggaaaagcatctgacacagtgaatataccgatgaggtgaaagaactttgcgatggcctttttgcattgcattgcctcttcagtatcctccgacgatactgagcctccgcctccaaagtatcgttttcctgccaccattctcacgatcatgttcagagtcatgtcctctaaccagctctttagatcaaccattactggttttgtaccgccattcttgaaccacaaggaatacaaatctttcacacctgcatgtgacaatatggcatcgtatcatataacaatatcgacaattattgttatatacgtttggtacggtagacatggtttttaagaaaagtaattacccattgtgatctcagaaacacgaacgtgcttgagcatctgaagccgccggttagaaagaagctcgatggttgcgattttacgcatctcacgccagaaagcgctataaggggcaaacccgaaaacagcaaaattgtaacccatgtgctttgcagctgcagtcataggacgtgaagccaaggccttgtcgttcacagtaaaacaatctttagccacctcaaaactgctcacaacaaatgcttcattgctcccaagttgtagcgacatggctggaccgtagtggtcagccatttttcctaaggttcggtagagaagctgttccttgccaccgagaaggtgaagatggccgatgatgggccatgcaccacttggtgcaggagcttttacatattttggtttctttgatttcttgaaaagagcgataaaaacgaaaacaaggattggaacaaacaaagaaaagagggaagtatccatagtgttttgagagtgcagaagagatgtgtgtttggtgatttcttgtttgaatgattgaagagtagtgtctgtctctctatatatatacacacacagagatgatcggttcaacaccatgaacgcatgagacatacacctaccgattgatgatcaaaactatagggccccaattttaatttttattaatgcatgcacgagtaaggatattgacaatgaacaaaaagagcagtaattaaaaaaaccattttttaaaaaaattaatggctcgagcaaggatttatgcattgaatcaagagcattaataataaaccttttttaagaaacaaaatttaataatttgtttttcgattaatactctgtaattattagttaatattgtttttctcacatcttgcaagatccatgcataagctgcttttttctatcattatacgtctgttgattacacgcaatgaaattcgagtgattagttaatgccttatttgctgtttcactagtgaagtgcatagcgtgaccaacgtcaccaatattagacttttagagttaagtcaacgtaattaagaaatctttaactcaattatatattgattgatgaatttattcgatctttgcattggtcggacctgccttggacttcgcctggtggtgactaacttgtataaataatcttaaaaacttgcatgtactattgtacaatgaatacataacacacaactaagccggattggattcggaatcctgcgtgcttggagtaaaccattcatgcggtatataaaaaaacattattaatcaaaatgatcagaaataataattattatttatcagaagaaacttagttgtattgtatgcatgaaccaaaccaaaccaaaccaattcaagaagtgattaacccttaccccggccgaaacaacttgtctagcccatccgagacaactactatctaaacaccactgttttaatgttcaaaatatagtttcttgttgaaataaatggacaacattcatgattcatgcatggtcttaaacaactttcattggctatttgtctttttacacaaacgcaaaattgggctttaaaaactcagaaacaatgttttattcatggaagcccattaatatttgtattggactattggacatccaaaaagcccacaaagagctctgctatttcgattcagttcaatttccaatcagagaaaacctcggaagagccctaaacgtcggcgacgaacatcgatggctcttctgctccgtactcttcaaaaatcacgcatttctccttctcattcctcaagaaccctaatttcttgggttcgatgcaaatctctcttgccaaatcaccaatcacgagacgtcaccacatcgccagctaaatcacccttccggtccaacattcttcgaatcataagaaacgagatcgagtatcaatccgattatgctcctccgcatcaggtatcatctatttcgtttataatcactatctagacagctggaatcaatgtttatgctagtcctagatttcggatttgtgtaattcagttgttctgttgaagtagatagatgagggagacaagtatcactgtatttgaatcaatttgtttatcaagaagtagactttatttgttcaagatccaagtaaatcggaagagaagagatactgatgatttgtttttgtttcacttaaaactataatgcagccagcgactgaattcaaatcgttctctgtggaggattgtcccggtgagcaatgcattgtgatgaaagggaagtttggagaagatgaggatatcaaaatggaagcaactatgtttgatgggtttatgaatgttccaagagccggtttagatgcttcagggcacgatgtccgtcttcatattagcttgcttgttgacatttccaaggttgatggaagtgaagagatcgagttcctttgctccgtctggcctaaccgtattgaaattcgaaagctttacaagcttagacgcaacaaaatcactggtcagccttacatgggacctaattttgggtacttactactaatctctctgctttcttgaatcactttaaatgtagagtgtagcatttaactggtcttgaatttgttgatacagtcaaggaaattgcctagttgaattcagctactgaaccttgtgatctttgtttctttgcaggaatttgaagtatgattttcagacagcgattcgggagtttttacgagtaagaggaatcgacgcagagctttgttttttcttgcatgaatatatgatgaataaggataggattgagctcattcaatggttgagaaagctaaattcattcatctcacaataaacacgaaatatttcgatgtttacacatcttctaattaaactgttttatcagttaaaagtagtaatattggcttattgacaaaaaaaaaaagtagtaatattggctttagttacttttatctgaaacaaaatgtacaattgggccttagatgagtaataaacaatagaacttgggcccaaccctccaccgggatgtttaataactgtgtcttttagtgtggttattaattaaaaaattaaccccttttggtgtgagccaaagaaagaaaaatagattaaagtctttcatatacatcaattaaaaaatgttcgatcaattaaaacgagccatgatgaactaatcatatacatcatcatccatcgtgaaaagctagctgttagttaataattacttaataataagaaagaaaaagaaaatgattgttattacttattagtactgctatatactactccatatggaatagtaactgctattatctggcgttctagagttgacatttaaatgtcatagttttatttagatgtggaaaatctagtaagagtaatagagtaggaagtgattaggaagcaaccgaacaagaagcatattttatgaccggtgtggttagcccttgtgggagacaagattacctcaatttttggctaatcttgattttcctcctccattttattattacttattttctttctttttattattatttttatcagcatctttctctttaattatttttcttaaaattaaacattacaccaaagtgttgctgttaatttctcatatttaaatgtgaatagatatatactatatactaatatacatgtgtgtatcctatatgagaccataagccaatgacagtaggtattagctaatgacaagtgacttccaataacttattaagaagtagaatctttacagatttgatgtttacatggatcttctagaaaactgatttctttaatctctctaatgtcatctgcaactatttaacatacacacacacaaaataaaataaaattggaagagctaatgataatgatttgtattagaaagttgtcctttattttccaatgcattgcatcgaacatatgttgatgttcttttaaaatcgtaaaatctagttctgtattcttttattctaggtttatcaaggctttgtcacaagacaatgagaatacaacttttctctaattttcttcatatactaaataaattatcgtagatttgtagaaggttcttaggctagattcaaaaagtcatttaggatctctttctagatcttgcattttttttagtaaatcttatgctggtgatacttttattaaaccttatgattctaatttggaaaacaaaactaactgataacctattttacattaataaaaacgatgcataattgtaataatgttttatttttttatgttaataagctagccaaaacatattattgatccgaagtacgctattttctataagaaaaggagaggcacggaaatgaacacgctgtgtggttaatccaagaaatcatacaaaattaattcataaactataataaaatcattgggatcttattttgcacccaccaagcttgtaggctgaagatgcggatggaacccaacttcaagaaattcttgccttttgttttatggcttttttttgtcttgtcatagttatataaatgtattttgctaaatttaaacggacaatcaaataaataaataatatataatttgtagttaacaactaaattcaatgactaatatcatgtaacaatagacttgtgacagcagttttctttgttgacttcaaagtttaattcgagcgtacgatacatttggtcggtgataaatatcgtgctatgagtttaatttgttgacttgaaagttttataaacattgtgaaccattgtaacatgtgtttcttgattatacatattcctaaaattaatttcatatggtaagagtgtaaaattatccaagtaatggtgtaaattttaaaagtcttttttttttttttttttcatcaattttaaaagtctttctctgacgttaaaaatagtcttgtcttaggtttgaataatatcggcattagccattattggtcgttactatgggatacttaattttgctaaatctttcagaacctgtacgagataagcgaaaaagccatgaaccacggtcacgcgtgtctcgcacttcccaactttcaccatgcatgctctcactaaagcctgtctttttttttctttcttttacatattttaaaatcataataccataatttgcactaattcttatggtaaatccgttttatgagatactcaacttagttgtccattccttaagacacagattaaggaaagtattcaattctttttgaagttatggtaataactcaaattcttctttcctgccttgaatacttggtacaatatcacaaacatatctctaaattaattacatgatctgcagaatcatttacataaacactttcacatttttatccatttaaaaaaaaaaatattatgatcctctttccttttcaattaattatcactaaactaaaaaatattattcccacagtcaaaagaaaccaaactaatttaaaaaaggtggcgcgtgattatcacgctcaaatgaccgatcggttccactgaattttctcagagattctcctctgaaaatgttttttgtttttttcttatgtcaaaaagaaaatttaccagaaatgattaaaatttgaaaagagaattccataaatgagttaattcgccagtcttgaagatcattacagagttttcagaaaccatatgtagtcttagattctcttttgccaaagaagaaaattttactctgccatacaactttttgtctctttctctactaataataataatccgaactttgtttgttcttctacttcaattcataatctttgacggcgatgactatggagcaagaaattgaagtcttggaccagtttccggttgggatgagagttcttgctgttgacgatgaccagacttgtctccgtattctccagactttgcttcagcgctgccaatatcacggtttggttccttctctctctctctctttgtttttttttaataccaaatttcttgatgttttctagattttggatttggttaagctacaaaatttaacatcagattcgtttcttgtcataacaccataaatcgattcctctctagatttttatatttttgaagacgagcttgaagaatcaattaagactatattagctagattcactctctgcatatttttttacttttaaaaatccatgcttcagattttgttgcttcacttgtgtttcaaaggtcattggttcttgttcgttcgatttgaaacagtctcttgttctgtaaaaattgagactttggggaattattacatatttgattgctccccatgtgtcacagagccattggttcttgctttactacttttgaatgagtcaaaactgaaactttgtgggtgattattattattgtaatgtgcagttacaacaacgaatcaggcacagaccgcattggagttgttgagggagaacaagaataagtttgatcttgttattagcgatgtcgacatgccagacatggatggtttcaagctgcttgagcttgttggtcttgaaatggacttacctgtcataagtatgcagctctccttgttctagttcatagttcctagagaaagttttgatcgttagacagatttgactgtttgaatctttaacatgatgattgaattcttgcagtgttatctgcgcatagcgatccaaagtatgtgatgaaaggagtcaagcacggtgcctgtgattatctgcttaaaccggttcgaattgaggagcttaagaacatatggcaacatgttgtgagaaagagcaaacttaagaagaataagagcaatgtgagtaatggttcaggaaactgtgataaagcaaacagaaaacgtaaagaacagtatgaagaggaggaagaggaagaaagagggaatgataatgatgatccaacggcgcagaagaagcctcgtgttctttggacgcatgagctgcacaataaattcctagcagctgttgatcatttaggcgttgagagtaatgtttcttgatctctctacctctagttttcatttagctgtgaatcatgttctgatttataagtattgatgatgcaggagctgttccaaaaaagattctagatctgatgaatgttgacaaactcactagagagaatgttgcaagccaccttcaggtgagagttagactatgattcttcagatttgatctgttagtgttgatatatgtatgattccattaaacacatttgtaatgtcttttggttgcagaaattccgcgttgctctgaagaaggtgtctgatgacgccattcaacaagctaacagggcggctattgactcacattttatgcaaatgaattctcagaaaggacttggtggcttctaccaccaccaccgcggaatacctgttggatccggtcagttccatggtggaaccacaatgatgaggcattactcttcaaataggaatcttggtcgtctgaattcccttggagcaggaatgttccaaccagtctcatcatcgtttcctcgtaaccataatgatggaggaaacatacttcagggtttgccgctagaagagcttcagatcaacaacaacatcaacagggcttttccaagctttacttcacaacaaaactctccaatggtagctcccagtaatctgttacttctcgagggtaacccgcagtcatcatctttaccctcaaacccgggtttttctcctcatttcgagatcagcaagcgtctagaacattggtcaaacgctgcattgtcaaccaacattccacagagtgatgttcattcaaaacctgacaccttggaatggaatgcgttctgcgactcagctagtccgctagtaaacccaaacctggatacaaatccggcatctctctgcagaaacacgggttttggatccacaaatgctgcacaaacagacttcttttatccattacagatgaatcagcagcctgcaaacaactcaggtccagtgacagaagctcaactgtttagaagtagcaatccaaacgaaggtttactcatgggacaacagaagcttcagagtggtttgatggcttctgatgctggttccttagatgatatagtcaattccttaatgacacaggtattgtatacaataaaaaccatttactttttgcaccttattcttttggagatttctgaagatttgttactttgactgtaacaggaacagagccaatctgatttctcggaaggtgattgggatttggatggtttagctcactcggaacatgcatacgagaaactccattttcccttttctttgtcagcttgagaaacctgttttattcagacacaatcaattattattatcttttggttctgtctcttctctcttctctgtaatgaaagtgtaagctattgtttaccgctcccccactggtttgagcaacttaggaagatccaaatccataaataaaattcaaaaagtaccctctttgctacaaatgtaaaggtgttttgaagaggaagtcaaagtcttcgtgtctaagtgcaaaataacgttagaatcaaagtagtacaatgatttgtactaccagcctaaatcggccccatatgcccaataacctggcttaggtgtcaaccacccaacattggcgaccttaagaaaaaagtctacaaagaaacataactttataattatttatccagaaattctggaagaaaataaagcctatcacgaaatgagtataaaagtgataacgacaacaaatacaaagcagagagatgtcattaaattatacatcatcataacccaattacaataaagtgtctttagcgcacacgcatgcatatagaggagccattatcatactgtatactaccacaaagattctactaattaattaattatcaccagctaatatattagcaatcaaggaaatgatttgaaaagccattaacatctcgtgggtccaagccaatcctcacaagaacacctttggcatctttagggttcttcatgaaataagcaacttgtggcaccggtggacacagtggggccatgtaatccgctggctcgccgccgttgccaaagccaacattgtgaaatggcatttttgtccagtcggagattagggttagctctttgagaggagggagatttccgtcattactacctccgagtgcttccatgtaagagtttatgtaaccttggtcaattgatttcttggcttctctgatcttgttgactattgactcgagtgttagctcttcaagtaattctctggcggtggatgccaccgaggcaagcacgtatgcgttgccggaaaacccttctggcagcggtgtctccgttcttttccttatgtccactgcgaattgtaaacacaccatggcgtctctcctcaaccctaaagcccttgttcttgcctgcaaaattatacgcttaatatttatgtttctaactttcttataatggctattttaaaaaattcttaatatagttttttttttaaatcatcaaaaatgttttgaaaattttaaaacgcacacctaaatttttgggtgaaaacagtaatttgtaaaataaatttcttgaattcaccttccacaaatgagcagcaagaaactcaaaggaggagcacatgaacccttctagtgatttcttcttcatgctttctatcgcatcgccattaagctcgaacgttttgatcacaaaaccagagtctggtaactctaagttacggttttgctcctgataggtcatcatcgcctgtttgatcaactggtacagatgacaaatggctgcagcattggtttctcggacagcatcccggttaaccagtagatttcgtcgatcatgaaccggtttgatgaccacatcttcctttttattagtaatcttgctgttggatttgttgtgaatgtgagagttggaggcccacgcgtgaatgaattc

SEQ ID NO: 656 - DNA, 93353 bp, Arabidopsis thaliana
gaattctttggccttctccatattcgaaatagtatgatataactataatcaatgagaacaatgttttaaaatccttcatagtaaaaaaaaaattgaacatgcacagaggaaatcaattccagaggaaggtaatgtctcacaattttaatcttgatttgaggatctatttatattgttgagttggaggttgagtcatacaatacttttgattacttgtcaacaattcgaaattatgaacttagttttagttctaagagatacaacctttgataatatcatttagatgactaataatattaaatttcatcttgataatatacacggataagtattgagaaatttaaaattaaagtgaaaatattagctttagttttattttttaaatataatatttagagattttttaaatataatatttagagattttttaaatgaatctatttgtttcagaactaattgacctatatttcacattcatgtttaatttaaataatgatgtggaaactggaaacagattcttgaaaaaaaacttttaatgtttctttaatgcttttttctttcagctgcagagtgatttatttgcattcaattgctaggtaaattcaattaaattaagttttttttttttttaatttgaagtctatctacagttaaattagaaaactaagcattaattttacattaaaaatacatctacatttgcatgacaaatatacaaatctttaacatctaagtaaattgtttactgtttagattaggattaacttttaactagcataataatcccacattaatatgtaagataatatggatttgtatttgaaaagaataacaaatggaaagtaatattttttccgtctactagactaaatcattgattctctggacccaaagaaaaaaagaagaagactatcattaattttattaattgaaaaaaaatatggccctagttggctgctgctgctaatagatcctcccaagtgactaatttttctctgggcttgtttctctcaatccccatttgtttttctttggcatcaatcttctcccacccactaaactccaccttcttcacttttctcttctccagcaattgcatcagtcctttgcttcctgcttttgagctcttccaaacaccttcttcaatgtcctcgcttatgctaccaacctgcaacaaacacatatctcctagttaaagaacatcagttctattttcagggtcgacaagcttgttgcttaccgtttcttcagcacagtagaggtttgtggcaattatccctactggtcctcttttgagccacccacatacgtataagccaggttcagtctgtgatatgtctcctgacgtgtgactaaccactcgaccctttacatttgggacaacaccttgaaacaaacaattgaggcagagtcaaaaaaatccgaacaacttcatttttttttcttcgtagacactaattacacaacactttcatattataccacctttcttgtgatcaaatggtaaaccattgactggaacagacttgtaaccaatggccttcagcaccatactgcaaaattgaacatactttcatttgatttgttatagttcttgtttaacagttacaagagatatgcacttaagacctttcattagagagcacattacctgcagttaagatcctcgaactctcctgtaccaactgcaatttgctttccggttccaacacctacaagttacgaaagatatggatgaaatgttagcaaaatatactattgtatcctaagaaatcaccattctatttctagtgtctccagctaagcaatctacagaataactaaggtgcacttactttcaagaatggttttttgcaagtttacaccggaaacatgtccctttctttcatctgactctaagaactggtcaggttggcggaagaaaacaaagtgcagctctcgttgatcagggtctgcttcggatgtttttgctgctgctgcagccttggacaataattcatagatcctcttcctggctctactagttttcatttcttccttcgaaaaaaagaagagtgtcaagatacagttcgtggaggtataaacaaatttactaaaaatgcaaataacagggttcagccttactttaattgaaagtcagtaacacaagtacctcatcagcaggagttacactcaagtcagtctgctttattcgaatgtgcaagttcttaatccctgtattataaagagatatgcgtttatattcttaccaatgggaaaatagcaaacgccaatgccaacaaaacattagagataatgcaccaacggaaagataggaatatcagaaaatagagacaatacttattatctcacaaaaccccgagaaggtcaagacaggtaaattaaggcaaaggagtaaacttttgctattcaacatcttatatagtatcaagtatcaactactgcagcaaaataatcaccaaggcagtcccatatccagcagaacaaacagagtagacagtaacattaaagatagaggtgttcagcaagtacttcaacaaaatataagaaaacaatagaacccaaggtctgaaaaatggcagcacacacctaaatccatcacaccaaaccacattcttataaaacccaaacacaatttcttatgttatttcttatgtgggatgatcccactgagatctatcaaaaaaaaaatcaaaaagattagtatatggtttatatatgaatgttaccgagaacttctcgaagctctttagcagtcaatgctgcttgaactggcccccgtcttccgatgagatacaccttcctgaacacattacaactttgtatcagggactgtagttggttttcaactataggaaagatggaaaggaacaagattcaactagttaaacggttaaatgggaccttatagaactttctttcagcgcagataaagcatgtgtagcaatatcagttgacgccaactctgttgtcggtcttaagagaatccgagcaacatctagagctacattaccctaagttttgaaggatcatatgtcagagaggtcttgagaaatacatttactagaaaatttcggtatcaaactgttgttgatatgtacatcctgctaactaacaactaataggctctattaatcgcacaccatatattagagtacctggccaagaatgacagctgagtcagacgttttcaagtcaggtttcaaactactgtagtcaggatgcccattataccaccagacgaattctcttgcagagtatataccactcaaactctaccaaagtcaacgtactacatcagaatggatagccaacaagtataagcaaccaaaatacactaacttatgtcaaaacctatctaaacacctaattcgaccacatgaaacttgtaactggcatacctcacctggaatgccaagatctttgtcactttcagcaccatatgcaagcacaacctgaacacacataataactactataacaaacgaataggtccctgcgtcgttagagacacttttgagctaattagttgctaatctaaatcatataagagcatagttaagaaagtcataccacatgatacaaatcccgcagctcagaaagtgataaatccgatcccagctttacattcccaataaacgaacaacgctcgtgttgtgcgacacgtgagaactgattaatggcaatctgttgtagaaagcattgtggttgacattaaatcaatggagaaaatcctagtctttctctaaacaagattaagctaaggagtggtaccttagtttcaggatgatcaggggcaacaccagaccgaacaagtccaaaaggtgtaggtaatcgatcgattatatctacatgcgctccttcatgcgccttcaatacctgattaccagccatcaaatcacgagctaagagtcataattgatgatataaatcacaaaatctggtttacatacactatattttgcagaatatgagagaaagacgtgtgtaccttgtcagcagtatagaaaccagcaggtccacttccgacgatgcaaacgtgtaaaggacgggaagaagcagaagagaagtatctagacaccatatatcttgctagatatctactcattttcaccaatttcaaagaccagggcttgttttgaaagtgtagcaaactgtgaaagtgcgtggatccctcgaaattgtggtttctatgacaaacgaatttgggttctttcacttaattactcctaagacgatggagttagagatcaacacaaaactgttaatgagattgtctatgattgattttgggaggctttatgagagaaggaatcgtagcgatagatttgagaaaaagtgtaagtagtaatcagacaacgtattttttttactgtgtaaggaggaagataaagatgagaattgagaagatatcacacaattgctggggataaatcgggaaaattgaatttagggtttatgaacgaatttgggaacatctaagctcactctgcagttcacgttgaccttttttttttcgtttaaaaagggttctcgttgacttttccctttaatagtttttgtttattatcatgttcagatttaaaaaaaaaaactcaaaatattctcagtaagatcaacttaaacacttcatggtaatttagaagtaaatttatatcttgtatatggtagctactagcttgtaagttagtgctggtcaggacctaatgcaaaaatcatggtaacatcaaataactcgctagtaataaactgtgtggtaaccactttccctttttctaaacagatccttgttttcaaatggttacataagatgatccaaaaacaaggagatgatcaacaactcttggggtccgtactccgtaacaatgcgtcactcttccaatttcaactattataacaagcaccacatacatggggcaatatcggacaagtactatatcaagaagtaagaaaatgtgtaacaggctatttaatctcattaattctatctttctaggcatcaactgttcatatatttaccttccttttagctctgcaaatctggcagccaaatcgtcatagtttggtaacttggggtgaacgtgcttagcttcactggaacgttctggctgaaacgaggctgcacgggcaaatgtttttgcaggttcagatggcccggccaactgttcagcgggtagagaccgtgaccgagccggctgatgaatcatcatctcttcatcagattcaccttttttaagatgggtacgtctgcttttggattcttcttgcacattgtccttttcatagcttgaaggttttttactgtaatgcatcagaagtttatccatcatcttctcctcactgtctttctcatcctcgtcaattaagacttgaaggcctttccttgagttttcccttcttcggctacttatgtgatcatcacctcccgattctacaatgtgctttcttctgttagtttgccgtttcagagatgcattgtctatgtcattcacttcatgatgacctgctccatttcgtctctctgccccataaacatttttaccattgtctggatgatttccttcttcaccatcaaaacgagcctttggattatctaaagcttcagctttttcatgccttgctttagcaatagattttttaacatacggaggtggaagggatttgtagaagggtgatttcattctctctgtttctcgctcctcaactttccttgctggatttgcatgatcatattcgtattctccacccttaacattatcaccagatggatcttcttcggtgctctttcccacaagaactgcattttctttactctcccgatcattatgatgtctcgaacctggattgatagattccgctctctttgacttgctatttggcttcggaggtcttgaggtactatcttccactttctgatgtgcatgctcttcatttttctcatgtttgtacccttgaaagaaactctcttgtttaaagccgataactaacttgtcagctcttttgctgctgctagacttaagtttctctgaagcattaacctctattttcttatgcagatcaactacaccatttttatgtccattcccttgaacgtggttctcatgcttgaccttcattacaatagtgtcaccatcattaaaaataggttgatgtctttctctagaaggttcttgcttagattgcgaataaaactctttcctttctgaggcaacaaactcggttttcttatgcgcatcaactacaccaggtcgatgtccattcccttgaccgagattcccatagttgaccttcatcactatagtgtcaccttcgttaaaaataggctgatgtttttctctagcagggttttgcttagaatgcagataaaactctttcctttcggccttattgtctttgctttccgatctagaggcgtgaagaacattctctgacctttctttatatgttagcccacgctgatttcctctgagaccattctgataactttctttatcagattgaaacaaaggatctcttctttctgatgcctcagccgtttttctgttcaagctaaccccattttcagaaccttcaaactcttctctttttggcaaggccatgtttctgtctacaggcttatacttgtcgttggtgctttttggggtctcctgttcacgtccaagaaagaaatcagaattcaatcactatccaaatatttcagtttagttgttccctaaaacaaatgagtcattgtcataccattactgaaatactattctgtctcacaatcctcttctcgaaatctttagaatcccaacgaatagagaactccaatgcaacatcttccattaacttcactttcttctccatagaaaagggcttggatgacatattctcaacaagctgtacaagaaacaagcaggtggttaacttaaccgtataagatttcaagatgagtcttacaaataaatgaatacactagaaaaactctttacctcctggttgacaaacaatgcaagtgaatctgtgtatttttcgtgaaacatttgcctcaattcacgcagctcaggcaactcggaaaatccagaggctgcaaacattaacgaggagatagcttcacggcaatcttctggacattccctgcaaaaaaaaaaaacaagcccaaatcaactaatgaaccaaaccatatttccgcatagaacaaatacttgaatcatctttgagaatgttccattaaggaaacagaacacatcactaaggaaacaggaacagtgtggataggaaaatgccaaaatatgaggtaactgacaatagttcaaaatattcaatcttttaacctgatagtcaatttaaaacctaacacattgatatgtagcagagatatacaaaaaaaacttttcatatagtcagggtaggttacaacaactcaatgaataacacaaaacaaacaacataaactaagattatgccaataatctaggagaatggcaaaaaaaaaaccatcgacacaaattaaaaaaaggctaacatggaaatctctcatacaacatatcaaaggcattgaatagaaaacttacggcgtcttttgcatggtagagagctgcttgtatacgaaatcacaggtctgctcgacaaagtcgagactccagagataccttagttcatcaagaagccctcctgcctagatgtatcaaaacaatacaaaaatcattcaaaatccgaatcaatcaaatcttaaaagaaaagcaaaacaggacaagaaaactaccctgctaaaagcattgtagtcatgaccgttaatgatcagatcagccaaatctctcttcagaaactttatcgtagcattccttttcctccggagaacatcgatccgattcttagtcagttttatcagtggttttctggtcgaatcaaaaatcacacatttaaaatcggttaacccaaagagaaattgaaggtgagagagataaatcgtatgaataaagatggagaaagatgacaaaccccttgggagcaaatccgcggcctaagaaaccatcaaacatctttttgatctgttacgattccgcaacaacaacgttgatgaaaatcaacttaacggtagcttattacacaaaatcccagattccgagagtgatcacctcgtatctcttattctctgttcggttgttctctctctttatttgtattcaaaaagccgcatctgaagctgtggagaacatggtggtggtggtggtggtgtattcagagtgctttctcgaaagaaacgacttcgttttgacactttttaatgttaacgttataaagggtattttcggaaatacaataatgtgtctttaaggagttggggaatcaatcaaatctaataccatctggttgttagtgggaattgggtggaaatgatctggtacgggtggctccaccttagctcattccatggattccgtagacctgcaccaattaatgagataatttaaactcaccgacgcggtttcgtcttttcttcaagtgaaaaagtgaaaaccgatgttaaggatcatgcattcaaaagagatgtatagaaatataccggatatgttgtatccatagttcacgtagattcataactactatataagttgttaaggatcaatcatgatatctgactagatcaatcacatatcaatcactccacgatatcttcttctatttatgtaaagtagattatgtaattagatctatcacatatattcctccttttgtactcaataaagattctctctttgaatataaacatttataaaaatctttttttttacaatatgtaacagtttattttattaaagtttttggttatttattatcattaaatttaataattcacatagattcatatctatataagtctcatcttaaaataatactaaaatttattttgtttacttacaattacgataggaatcaaacgaaaagatcatttttacatgaaaaaaaaactgtaaataacgtgaagaagagaagaaatataaaatcaacgtaataatgatcgagtgtttttaacaataccctttgttggaaggtgtttaaacttttgttttctttcttttgaattcttttcaagattctattaaatcatgtggatgtatatatgtgcttcagttcagagacagactttgtactaaatcaaggtaaaatatgtaattatgcggcataatatgccttacttgcttgtaagttataacatatggattccttttgtgcttaaatgcatatgtttgcttgtcatatgaggcatattactacacttccttgctaatcttttttgagtttccttaattctctttcatgttcattgtgcttttgtcctgtcatgtattagctagctatgtgttcttgttattcattcttgctaaaattacgaacacaatttagtaagaagcgttgttgctctttcttccaattcccggcagcttacttccaaactctccctttttggctaatggaatctctacgatcaaattgcaaaactctcatcaatgtgagcgacccggagaaccaaattgatttctttccaagtagatcaaacatattagaccatagtaacaaatgattgacataatgttcaatctttcagagcataaactgtttcggatgctgcaacagagaaaggcgtttagttgtggaagtcgatgagccatcaaagggactcaaaatccaaggaaagatagtgaagaaagatagtgcttcatcagatgacttctggagcacaagtacgtgtgatatggaccacaatataacgattcagtcccaatcttcaaacccgccttttgatccccaatgcagcacaagcaactctaccgaatttgtaaaccatggtaacttttgaatgttctaacttctaaggcctaggttgttttggatgccaaaaacttatgttatgaagcaagcagtatttattactcattcagttattctatacactaaaagatacactactacttattcatttccttccataaaaggacttattttgtggaaccacacgagacaacaatggcgtgaatgcttaaccagacaacaatgtctagttccagaacctgcaataaggtgacaaccacaaacagttacgaatattgaacgaactatttttatgtttatataggattggtctactgaattcgtcaatgttaaaatgaaactttgaattcatatgatttcagctggaactcgacgtatgatagcttattgagcacaaacaagctttttcctcaaccaatacctcttaaggtgatttgatttggttaattagttgttttctgctaatcataactcttaattttaattaacttacagcagaagattctttatcccccttagaacattttcatatcaggatttgaatctagtatatatcattgttgctaggaaagttttttttaaattgatgatgatattggtacaggagatggtgcatttccttgttgatgtttgggaggaagaaggcttgtacatatgattcattaaaaaaatatttttatactatataaagaaagcagaaaaacacagtttaattgcttttttcaagttccatatcatttttagtgtatatttattgcccttttataaatgaaattaggaaatttggatcaccttatggtcaatttctttatttttttagttataccacatttatactactgatgatgaaaatcgattttttgtatcgtgaacacttattaactggttttatcttgaataataaaacttccatagttattccgttattgttaggtcattgtaaaaaatcatcagcaattagtcattaaatatactatcaaagcttgtcagtcatttctcatcaattctagcaaaattattcgatatatccaaatccaaatgtcttggtttggtcatgactcatgaccgtggaaataagttcaagaatgcaaaaagtaacttatttgtgggacagaatcaaattctttgatccagttacttacgtctttccgtagccaatcaaattgaaatattttctttaggggtattcgattatggtggtcctgaagcctataacaattgttttccgataagatttgatatatataaataagggaacaatccccaaaaatgatatctagttaagatagtcgtagaatttacagaaaaggctacttatgtttttggcctgataatgcaaatactttcaaaatgttttatttgctaactagcttttagtttcgttctcgtatctaaagttagagattaacttactattcttgtattacgataacgttttgaatgaacatgtaatgatgcaagggtgtaaccaaaaatgataaaactttggggtcaatttgataatattgactaatagtgtggggcttgacaagaaccggaaactccatgatatttttgcagtctaaatatcttttcatctctcttctcttcctccactgaaatattccccacaagaactaacaatgataatgagaagcgcgtcttcactggaccttaacctacgcgccgcccagaaaccgtctgttccaagggtggtaaccacggctcgaaccgtctctgctgctactcctcgtgttgctaaaccgattacaagagcttcttcagatggaaacctctacaagattcagtcgccggagagcataacgaaaaccatcagcgtatatcacgaagaaacggcgtctttgagggttttggaaggatctcgactcccccaaggaggttccaacggtggatttggtggtagaggcggagatggtgccggaggtggcggtggaggtggaggtgggagcgtagatggttattacgaagagatgatccaacgttatcccggagacactctccttctctctaactacgctcgtttcctcaaagaggtttgttttaatctcctctgtttttcaagataagggtttttaattatacttgctaatttgggaaacttttattttactcttttgacaaaacccacgtgatactttatatagagacaaactcagacaagttaaaactaagtacgtattattgctattaaagaagtcgagctttgttcttgattttaggtttttgattggttgaatctactaattcatgtattaacattttggaaacgtaaatttatagatttcatccattaacagtttttcagaagaagttaatgtgtataaaaaaaaaaaggacattgaggagatattattaaatttaacatgtcttaatttgtgaaggtgaaaggagatgggagaaaagcggaggagtactgtgagagagcgatgttgtctgagagtggaagagatggagagttactgtctatgtatggagatttgatatggaaaaatcatggagacggtgttcgtgctcagtcttactatgatcaagctgttcaatcttctcctgatgactggtaagtttatcgataatctgctttagaccgtagaaccctaatgatcgatatccgaaaactatgacttgactttagatttgggatttcctaaagtctctccatgaagtaagttcataacttcaaaccatgttttgtagatttttagattatatcatatgaatgggttcattgaaagagactgaatgtttttgtggatcaaatgttatttcctctatatccaacctttgaagaagtgattggtcaatttgtatcagaacaatagcctcacacgtcaaatatgaaagagacatcattcatattatttttttctctatgcatctgcaatttaaaagttgtgtggcactagatgatagaatacgtaatcattgatagataaaaattataattttgatatatgaatggtatttattgcagtaatgttcttgcgtcgtatgctcggtttctatgggatgctgaagaagaagtggaagaggaagagagtaaacatcatgaggatggtttctctgactctacctataacccatctgtatcagttgtgtcttgactctttgtgctgatgttaaaccggtgtaatacaatgaaaactcaaaggtccggtttaatcaggaaaatatcttctgcacacattgaagtagattgatgctaatgtgtatcaaaaggtccaaagccgcattattgttgcaaaatgcggattgcaaagaagataatagtggtttgtgtccttaggtttagagctaaaaaaggtgtgaaaatgagacttgtgagcgaatcaattattgatcaatggttacgagagatgtcacgctcaactgtcgttatgtctttgacagttgcaatttgcccataaaactttcttgctagaggttatccgcaaacaaaccactaattcaacctcttagctacaatatcttcatgtacgtttttgtcgaaatctcaaaatccatctcctacaatatcatgtttactaattacactttgatggatagccacaaaattttggaaagaagagaatcaattatataacaaaagaatttgcacataagccataataacaaaaataagaaaaaaggaaaagaaaagaatacacagacagaacgaaagcagtatctcctgaatattcaccttttaggattgaaagcatcaaaaagaaaaagaaggaagatcttgacataaaagaaagaaaaaaacaccttaaaagattaaaaacattaccatcaaacataggaatatataaaagcacagcaacctttagaaccaaatccacatgattctgtccactctttttacccatctcttctcatataagttttggctgaagatatatataaatattatacggtttctttctctcttgtcctccttacttaatgcaagagatatgatgagtcttgagagtaatgatcgtaccgcagagtttttaatgctcaacagcaaccgcttcagatacctcaatggacttgtcggctctgtcttcattcatccttggagatacagtctcatgtgaatcttctacatcagcattggatgatactgtcacttgtgcttcctcttctgtgggatgtgaagtctggtttacggtttctgcatctttttcaagtttctttttctcaggtcttacctttgctgggattatggcagcttttgctggggcgggttttccatcggggagaactgttttctgagatggcaatcttggaagtgacttgcgcacaggttgcttcttcagatcaactgttggcataattccctttgcagttgggttatctttagaagctctctcatctaggcttagcctaccaaggcgaggggtttgagtttcttcagaatctgctccagaagcagtcttctttcgcccgagttttggagattttggtctcgttggtggtatcttcttggacgtgaacaaaatttttacaagaaacgtgaatattagtacttaatattaagtgagatcaggtttgagcatagagcagaagtaccttctttaactctgttttaggcggctgaggttcttgataaaagctaggcataggtgtggctttgaagttcaaactcttccttagcatcctaagctcagcttcttgtgtttcctgcgagaaaccaagaattttgttttggaggaggccaagcatctaaacactatgacaataaacagggtgggtataggagacaaccttggacttggcttgcatgctattaatttcctcttcttttgcatgagtcttctcctcaagcttaacatagaactgcaccatatgaaagcagatatatgattacatgtaattatttttgtggcgagaggacaatctagtgaaccagaatgctaacctcttttctcttttcagcccgttggtcacatttgaaactgaatccataatttggaagtgcaccaactttacgaggttttccatcgtctgctttcggactactaagaaaccatcaagttattttatcaacataaacgcaaaaatgagaggcaaatgaagaaaggccccagctttccacaagaaagacgagatggtaaatataaaggtgaaagaaatacttagaagactgagtatcatcttcagatgtctcatgggcttgtttcttttgagactttggtttcaccttctccctgtatcaaaaagggaataaaacttccagtttcaatgattgattaggaactaacagataaatgacaatacttagcaccaaggtctagatgacatttattgacaaatgttttgggttctagcagtgaacccgtaagaagaccatatggaaagaaactctgatttctaaaaaaaggactcaatacccatcagcgctttcagcaggtgcagagtcatgcttcccttgctgaaggaaaaagaagagatcaacaataatcatcagccagaaagaagatcacatccaaatatgcataagctaaagcgaagaaacctagaagcaaattgtgagggatgattacctttgtgacttgtgcctctcgcccattgaatgatttgctcttaagaggatttgttgtctgtacattaggagcaacagaaccatttgatgctgccactttagcatctgcacttttgccctctttgctctttttgatgtgaaccgatgaattattcttaccacctgatagtttctcatgccttggcttccgttgagctttttcgcctttcatacactttgaatcatctacatgttcaacttgtgtgccctaccataaaaggggaaaacacaaatgttagtcacaactattttatccgacaggcaagtagattgaccatccatagttacaaacctcagctgcctccttgacgtgttcaattgtatccaaagtggaactgtttgccgaattctcattctgactttctgaagtagtgtccacggtttcgacagaaacagccccattttctttaacacatacattttccattgctaaaccaccatttgcaggagcagaatcagtcccatcagcagccatgatactctcagggtccatagtatagtaaactacaaatcaacaaaatatagaagagacagaaaaggaattagcacaccactaataaaaccgtattgtagagtatacctaaaatagcattcacttaaatcagagctttttctagtgtttctgaaatgagctatacatcaatcagcattgtcagtgacgaatattgaagctacatttttatagtgttgaacatagaagcacttgtttatccaatacatatacatagtctactcataatggtgtatatggatccgaagataatccctataagtcaggttttttcaaatcatctaatcaacattttctgcctacaccacaggatcaacgagagcaaatatccacacaggaaaaaaaaaaaacagaaagaaaaaacctaacttgtgattactgaatcgatctaagtaaacaaatcggagaaacgcaaatcaaacctgggagtggaagcaaatctaatgcagacaaaaaactaaatctagtggtagtgagctcactagtgaatcggtaagtgacagttgtagtttcgatctaccgacactcaaaaccatgaaatgaaaacagacaagtagataagttccacagattcataagaacatccgccatttgagacagcaaccaaatagagaagaaagaagaaaaatcaggcaagaaaacaaaacataaacactaagacggacttgttgctcaccaaacgcagtcagagagcaaatcaaacatccattgaagcaaaaatcgaaggaatgggagaagcagaagaagaacaaggacgaggttttcacagagttgagatttcgatttgttcttgatttttttttttgatttttttttggtttggggtttgtgagagatggattctcggtctacacaagttttgattctgtctgtgaattaaaaaaaaaaaaagagagagtgattatttttttctttgagaagagaaaaaggaaaatgacaaaacgtttttaatatttattacagcggctattcgaaatctaagtgccacgtcattatagtaattacggttattcggtggtttccttttttaattaatcgtgggattgagggggggggggggggaagttttaattaaaactcttttaattattattattttccagtattaatcttttaaatccatattaattttgctgttagcctgtaacaatcaaaaatctgaattagatttttttttatttttatactataattctagagagtgtacattgcgattttcaaccttaaaaataagcgcatgttaactctttcactcatcttatgtagtagaatcgtattacaagttgagtaaaatccactaactgaatctagatgggacatttcaaaaaacatatgaaaagtttaggattataaaaaagagacataagtggttggcaaaaaaaaagaagaaacataagtgggaaccaagtccaaattaatacttgttataaaaagaaaacccggaattaggggggattttggatatggttagagattgcttttgatttaaatacaagagaaagagagagagagagggacatgaccttctcattttcttaatcaaacggtataaacttttcgttagttatacataaaattattgcaatcgctttattaaggtgaaccaatatcatcccccacactgttatcatatactttactcttaaatggaaccttttattcatcttgttaattaattaacacctttaatcagaactattaaagccacctcatggaatctttttatttttcttgatatatataaccaaccccttaattttaatattgaggacaaatttttaaaactaaagataaatatagagtctagtggtttgttgaatatgggtatcatgttatataactcgtgtcaaatttggaattgtgtgtgaaatcaacaatgataaaagattgagtttttcttagacgaatatatgatggtacaatttagttaaattattatgaagtacctttttcaccaatcaacaatatttcaaagttggaatatgtaaatagtgagtaattaataagcaagtacagcatttcccattttatgaatataaaaaaacaagtgttacatatttaaatacatgcacccacatgtacacacccaaaagcttgtggtaggccaaaagaattaaatcaaataatgaaagtttatattttaagaaatcaaatgaaagttaactacacttatttcgttgactacagaggaagtaatagtttattagtaatacttaaaagtaactattagaaaactaatcagcgaacttagtaggtgttgctccagatctcttttcttcccaacatatattatatcctgtatgattttggtcatcagctttcatgactcatgagtgacgctaagtttaacaattataaaattgtagcacatttactaagaaaaaattatattatgcagtactagatttgagaagaaagatatcagtgactttgatacaaattatgatgttgatcactgagacacataaaacactttggcaatgcaaaaaaacaataagaaacttatataagaataccaaacatatatacattattggttacaataaacagtaacgtctcgtctagatgtgaatactggagtcaagaacgtaacacagttcgaaaatgtcaaataatctcttgatatgtgtttcagtttttacggttttgttaccttaaattgtacaacacgactgttttgcttagtgaaaaaacgaatgtcttatgctatttaacgttgttactttcaaagtttttatttgcatcatccaaatatgttgggttaatacctcaaattttacgacaaaaaaaaaaaaaaaaacctcaaattttagtgagatttatttcgtaagaatatcataagtcattttttcatcatcgtcgacaactcctcacacatgcattatttttggaaaaaggtaaagtagcgacactattacaagtcaataaactactcagttcggttgtgtgataacaccataactgtacatgaatgtgtatatgaacttgttataaatattaatactatccatcattgatttgaattataaaatattgtatccatatgtaataaaccgtaaaatataagtaaaatacaaagcattagacaaaataagtatcctaccatgcatgttcccaactagttaagtttgatgggttttctattgaaatttatataattgaagtaactacaatttcctttactagaaaagtggtaacagctaaaaaaggtatgattatcttgattagcactgagagagatagagtgattagagagtaagcaaagtcagattagacacaaaaaccacttttattaagagacaagttggtccagcgattagggtaagatagaggtaccaagtacaacagtgacacctttcctttcttgctgcttctcaaaactttctccctccatcatctctatctaatcccaaaatttcattatcttatctttttattttcatacatttttactccatttgtgcttccttttccttttgtttctaactcagcattttctttctaaatttttttaaatgatttattattgggattaacaattggaaaaccttttttcataaaactgatatatcctaataatgttttcataaataatttaaattagtaaattgttaattagaattatagttttaataacaaataagtattgtaaaatgattatactactttagttatcaatgaattttttcagatcaatttttttttttttaattccatgaatctttttgagtatcaattcttaattgttcatttttccattattttattttttggaactttcgcatacatgtagtagtagtagtatctcaacgtggtatggcaatagtcgcaacaccttgagacttggatttctatacattgtgaagtatggtagcagtttttattatagattttgcttttatgttggtcggtgtgtatccttgttggaagattcgcttcaccattcacatatcaaattttatcttatccaattgaatgcgattgtactactctttgatcacgatgtattttaaataataagagataatgactagtagccaaaaaaaataggttgttagacaaaacacacatgttaatatctcttttgacatagaaacggcatattcctataaaaactacatctacctacgacgattcgtacatgacctattccttttcttcgtgtctaattactacatgaacaaaacataaattgtaaaatctactcgacctaacttataaataactgcttaaacgacataaatcgtagcggttttagcgtctcgttaaaagtcaaaacgtccgactgctgaataaaattcaaacactgaagactagaatcgtcatcgttttagttttgtaaagtcaaatcaaacaccgaatttattattcggtgtggcatagaagtaagttggtgtcaagtttgagtatcttttatgtttagtttcgtagtagtaaactagtaagcagcgaaatttttacttattagcaaataagcattactacccaaattattcgggcatgtttgaaacacttatgagctaacaaaatataaaactagattagatatcataacatattccatttggccccagaatttactagtttgatataagcatttgtgaagtcttcgaagaacttgtcttggtcttctgcataccgtttcacccacctgtgcatcatcaaaccacgaatctatatcagttgaatagttatccagattactcaaatggcaagaacagtgatcaacagtttacagtcttgccaatgatcctatactctctaagtgttcatctactttgaatggtacttgagagaaaaataggtgatgaaatgataaggtaagaactttgagtagatgagaaaccttaagcactcatcatcctgcactaaagcatgatccgaaggaagcccgaccatgctcgtcatcttagctacagcattgtaagaaaactaagtaaatatacaatctcagtcttacaatcaatcttcagaacatagggaggaatggtagaaaactgaaactctatgagtaaaagaacttaagaaccttgttatgacttatgagacttacaagttgacgtccatggtttttcaagaaggattttgtagtatgcattgtcaaaaactgtcggatctccaaagcctttactcccaatcgtatgtgccccagataaggcaacaagctcctgggtcctggaatggcacacaaacccagtgatgttaagttactcatacacatacattgtgaaacaattctcagctaaggactcacgaaaatccttttcttttgaagcattctttcaatcccgaggcactcagggtttctggaggtagcttgccttctggatcaggttgcctgtgaacatgaaacaatcaccctgttaaaagtatagaaacagtgaccagagatctatccaataggattaaaaaccgtttatgttgtgcttacgctgaatcaagtcttcccaaaactactggaattgttgggccgccacatattgaaactgcttcagacccagcgacagagatcatatccgcccaagacactgagatcacataaaatgtgaaattagcacaaaggcgcataacagaacacgtttctttggtgcacacagttcaaatagtaatttacctggttgtatctcgtcaaccttaacctttgctttcgctagaacctaacaaagaatccattttctacgaagattacttatttgaaaataagacaaatctgataaacaagtgcaaatagacacaaaaaagagcagttaaaatagatgcgaaaattacatccttattagctcacgccaacagataaaagagagggatttagtgcctttaaggatttcttcaaacctatgttctcaggtctctcaagttcataagcaatagatccgttgatgccacctgcaattgaattcattaccaagaagaactaagacatagttacagtatctttcaatgagaacaaaggaaaataccagcagaagtatactaaatcgcaaagacctgaacctaaaccaaccaagcttggttcatcaaagccaaaactgaggtatattaaattgtaaaatgataagaacatcctgagagagccactgaacaaaccagttctcacaatacttgatagtctattaaactaagccaataaacattcacaagctacccaaaacatccaaaaattcacagattccattctaaacataaatctaacaaacaatttttacatttgcaaacttgtctatcaccaaccagtgaacaaataaaggaactttcaaatctatatccatgttcacctatgttgagtttacaatgaaggaaacaatctaacttatacaaaatagcaacttgacaaacgagtcagatatactatacttgaaagtaaaattctgatgattacagaatacataagagtcatggaaagttaccagaatgatcgtccagttcaaaggttccagcatcatgaaacactaaacgaagcacaccagcagccttgccctttgtcaccactttccttatttcgttttgcatcaccggataaatcctgaaaatccaactatcaatttagtacaaaaaaattggaaaactataatttgaacaaaaaccaaattcagagtcaattacacaaaattaaggatttgttcaaactcactcagctgcgttcccgttttgcggaagcatatgagacagaagctgcaccgtcgacaacaagactaccattttccttctacttgcaacgaaaacatgactcgaacctacaaattatgcaattagccaggacaagtcgaagaaaacgaaaacagtaaaatagcaatggccaacgaaaccagaatccggtcttaccaggatcatcggataagcaacgaatacgccaggctcttgacgatctgacaacatgtttctcggtcgccggagagagcaatcgcgttttcgcgggagattcgaatttgcatttgaatttgaaagatgaaaacgagtcgcaccgaaacagaaaagtcttaaccagagaagcagtcgtcgtcgtcatctttaacggtgggacgagagtctccgagaccctagctcaaatttatgaaccgggagtttcattgtctacccacaagcgtacagtaagcaaaacattatagccaataggaacgtaggatagagagaaggaagaccacggcacgcattccgaatgtaaaacgacatggagttctgtgacagttaagaaaaacgacgggtaatctatgaaataattgatctcggaacgttacaaaactgagtgatggctattcttttaagatgtaacacaaaaacaatatacaacaaaacatggtgagccaaaaacctattatataagatactaaaaattggctaaaaagattgctatctcggaccggagagtctcacggcggagagataattctcactgttacaatcggacggtccagatgacgtagtagcaccgccgtcctcgctgatggacttaaagaagcttgagtaaagtctcgatcccatagtggaagaactaggtggctggaccaccggaaaaacaccttcaagcatttgaacaactttgctcatcgagggtctcgtttgcatatcttcttgtatacaccaaagtgcggttttcatagccctttgaaccctttcgtcagtcacatcaacattcttcatcttcccatcgacaatatccataagcttcccttcttccatcttcttgaaagcaaaagaaggaaaatggcatttctccgaagtttctgatggatcatagttctttcttcctcctattaactctagcaacaccattccgtagctgtaaacatcactcttctctgatatcgcatagtttgtgatccattctggagccaagtagcctcttgtcccgcgcattgttgtgaagacatggctttgttcgcgggtcatgagcttcgccagtccgaaatcggataccttggcattgaagttatcgtctaataggatgttctcgggttttatatcgcagtgaacaatccttgcatcacaatcttcatgtagatacgctaaacctttggctgttccgagtgctatgttaaatcttgtgtcccaatctagaagaacatcgccatcctttttcctaaatatccatctctccaacgaacctttggataagaactcgtatgcgagcagcctatgagccccttctgcgcagaatcctcttagccgcaccaagtgcagatgatgaatacttccgattatactaacctcggctctgaattctttcttcccttgaccgattccttcaagtttcttcacagctagacgagaaccatctggtaaagtaccttcatagaccgatccaaaccctccttgacctaacttcaccgagaagttattcgtcgctgactgaagatctttgtaagcgaaccgaataggcatcccggataagttctccaagaagttatcttcttctgaactctcttgaggagcctccaaaatcattttctttctcttatgaatccggaaggccacaaagatcaaaacagcgatgataaaaactgttaccacgacaataatcactacataaggaaaatgtttcccatcatcttctccgttatctccacctccagaaccagtacttgcgatcttgatgtaagacacaaacccagagcctccattgccagaggttttaaagcttccaatataatcaaacaagaagcaattaccagaactgttctggaagaaaagaccaaggcacgagcaattgttgtggcagaactctttacagctatcaagatcagttttcttggagaacggaggagcatacccaagagcgaaatagtctacaccgtctccagcacttactagctgcaaaggcaatgttgcattatccttggttttcttacagggagaagtaatcccggttttgcaatcagaccgagcccgagacaacccggacacacatccacacactttagaacccgagcagacatagtaaggcccgcaaggctcaggtgttccgcacagatcgctaggtattttagtcgaagaatcggcagcagatgctccgcttccaagattagaaaaagagatcacaccgttgtttcccaaaacagcgatccaagttgtgttatcatctttattgtctgagaatacaaactgccacaacaaaacctgtttctgatcaaagaaccgccatgaattcccaaggagagacgatgaagtcactacgccgccatctttgttgatgatcctctctctggcatttgccattgaccaatacacttgaggggttaagctgttaacagataaaaccatatctcctgatttgatctcaagggcataagtcatgttgctcgaagaaggactgctagtgagcttcatgccttctttgaaagcttgattcgtgatcagagtatctgtcggatgatcaaaactctcccagatcgaagttccgtcaacggaaacaacaacgagattcccggagtcacgcagctcgattcttgaagcgtttttgcctgaattatccaatctccaaacctcagttccttccatcaccacatttccgttgtcatcgaacacaaacttgtcggaattggaaacaggggaagctctgttcgcggaccagatcagtttcgtgctgctcttgtggatgatactgagtgtgaacagagtaacggaatcttgtgtagttacgaaaccgaaaccgaaggctgagttgttggattcgaggaagataccatcgttgttgatgtaattcatctgagatcctccaaaacctggagtgatgctcccgatggacgctacaccggcacgtagaggatccggtaagaaaaccagacacgttacgatgacgatgaagacgcctctcatggtcttcaaagatgatgaaattccggtaaaccccagaattgaacccttttaaaaatacctaaactttatgtatgtggatgaggtcaatggatctgagaaaagagaaatattcagagagatgcaaaaagacaaatctcagagctctgacaggtgaatagtacgcatctgtaaatggaaactgattggtcctagagaagcaaacagagaaacaagaactcgctttggcgttggtgtaaagtccaaaactttccgacgattgcagaccggaattcagacggaagggtgagaaagggggagatcgattaaaacccagaaactgaaatgaggaaaatagaagaagtgggcttattttcagggattagaaacactttgattagtttttgcctctctgtctaacattcaatgatgtttgattttggtctttttgatggagatagacgacaagaggggttgaaacagagagagagagaagtagagagatgctgcgagtgtcttaaatctctctgagccgtttccttcaaatccgtttcctttttatctttccctcttgtgaccgtcacaaaacttttggacagatccgaccacttgagtcttttctcttttcaaccaaacatgttcttaaattttccaaacccttttgacttttgacttttcaaagaaaaaaagacgaagacgaccgatctactaaattgatcaatattgcagattgcataaaatgttgagatcatacaaatatgtgcataataatttattaaggcaaacaaattaatttaagattagttaatatttttcttgtattcttaaatatgggtaatggttgaaaactaaacaaaaattgttatctagtgtctaatgaaatcagaatatgggttggttggtgttagatattgtgcaaccaaaatgaccgattgagttatcattactagtaaaagccattagttgaatctaaaatagggtagagagatagtggatttattttccacctgaaaatataatttatatagatggtaataaatgaaacatgtggaaaaggaaaactattactctgttatctagtgtgctttaaatgaagggcccgttagaggaataccaattgaagcatccaactattttttttcttaaatttgtgtttatcttatcatgaaatgtcgaaatttagagaactcttctttctttctttttgattcaggtggaattcaaagatggataagcaaacgtgaaaatatatttggtttggtattgtgtctactttgacggttgatgattcaatacagaactgcttcctctaattctttagtttcttccacctttgccgtaagaaaaggaaaatagttcctacctttaaatttttgtcaacataataatacctaaccttacatttccccgttataaaccaaaacaaaacttactttcccacgttaattggcgaaaaaaataatcagattacaaatactataaagattagggcacttgaaaatagagattaaggagaaaatatattaataaaaaaaaaggaacgtggggaagtgtgaaagaaagaggtgtttgattgttaaggtattttgggaagacgaagtacggatgccagctggcacttggacgtatcccccgtgtactttctttcccggagataatactcaaatcccaaaagtacccctggttgatgaaatggaccaaattactgctttttcacgaccgacgtgtgggtttggtttgacttttatgtgtaaatcttcttaggagagatcgaaactttttcaacggccaacgttattaacacaaatgtgctaaaccactttacgtcttgtttttccgtgttttatacatatagataccggtattcaagtatattgtactggtagtgttttattttattttgtcacaaaaatacaatatagattatagaataagaatctagaaatgatatatgctaatttcttataagattcagctctttccttcaaacattaactatttcttaaagatcattactaatctaaactacatttcatctttagctttcagctcttccctcaaactatattatggtttattattatatgcaacaaagagtacaaaactacatgttctactttgacaacaaaaaaaaaaaaaactgtttcttaaagatattgttgtgtttttatacaataaatcataaataggttcttatttggaggggtatgcttatatagtttaatttaaaataattgatattgattgttcaaatgtaaaaaaatgtagttgggagttaacttggtattaatgacccgcaatcatctacgcccattcaaatcttcaattataaattattcaggaattagttggcgaatcgccaagtgtattccatattataattaaaataaaactgtgaaagcattaaacgattaaaaaaaaacaattaaataattataaataataaagaatattagtaaacagcaaggcaatagtaacggatcagactgattcgtcgtggcctaaacagtgacagcgcaagaggtctcagtctcactacgaacgtccctaaaccttaagtgcaacttcctcaaacatgcatcttccaatatttataagtacattacacaatatttacacatttatttgtatgtccattgtctatatatatactacatgtaactacgttctcaccttgttctataagtctttttctttataataatataagtcattttacttataacctataagctctactgattttgaatgttttttgtctcaatgattttcagtatatctatatatatatatatacatatatgtgggactttttaataattttttttttcaaatacatcttgatatatatatattccttcgagaacttatctgaattatacaaaaacattatctattccttatatatttaaatctattttgaaacattgaagttgtaagttcttacgtattcattaataagatacttaagtagagttgtttcaaaatgaaaacttcaattctcaagcaaaaatgatctataaatgtttcaataagataattcatatgaaataagcaagactttgctatatcaaaggaagtttaattttttgttccacttcaaaaattaaagagagtataagttcagttcacacattgtctattcgacgattcctttccacacgaataagaaattaaaggaaagaaagagctggtctaaagatcggcaaagcagttgatggaaattattgaagaataatgttatgagaagctagggatgtcaaaatgggtcaaaattcatgagttaactcaattcaactcaatccatgaaccctaatgagttgaaatttttgactcaaatgagttgatgggtcaaatgagttatttggtcaattggtttgatgagtaaaatgagttgggttgtaatggttaatggtttcaatggtttacccaattaacccatcaaattttgtaaaattgaattaaaccaactaaaatctctaaaccaatgtcaatttaagtttaaccaacacatctaaaccaatctaataaaatcaatatttttccaaatttcttaaatatacaagcgatgaattgaaaaaagtaaactcgtaatttttccaccaaaaaacataatcccgtgattttcccgccaaaaacgtaaatccgtgatttttccgcaaaaaacgtaaacccgtgatttttccgccaaaaacgaaaatccatgattttcccgccaaaaacgaaaacccgtgattttcccgtcaaaaacgaaaacccgtgattttcccgccaaaaacgaaaatccgtgatttttccgccaaaaacaaaaacctgtgattttcccgccaaaaacgaaaacacgtgattttcccgccaaaaacgtaaatccgtaaacggtgaaatctgtaaatattctaagtttgatgataatgaattaataattattaataatgataattatttattattgttttataataataattaattaaattattatttaaatgggttaacccatttaacaactcaacccatcaaattaaatgagttatgggttgacccaattcatttaacaaaatgagttgggtcaacccataactcatttgattatgagttgagttgagttgggttacctattttgacacctctataagaagctttgcttactttttagaataacatttggatatatgattcctaatatttaactactatttgtatacttaactttgtatatccgttgtaagaaaacatgttttatataaaaaaatacaaactgttatagaattaacatctgtatttcaaactcgattattataattaaaagcatggacaatactaataaaccaaatctcctatgttgacgaatataaaatattacaacgtcgttatttcatgttacatctagatatgtataacatgtatcataatacaacatgatttcatgaatgcattataaattattacgtatgtaggcatgtgtgtttacaagaatcagcaaatcttatcttaacatatcatttaacaaagtaaaaatattatcttagcatatcgtgacatatatagtccgcatgtcgcttccactacaatcatacggatgatctcttttgatatcatcatgattcatgaaagccgtcaacgtatgactaagattacataattaatcaataatggtccaagaaaaaataataattatgttattattatatcgtaacaaaacagaatccatgagaacggtcctttcgtgtcaaaccaatacgtagagagtcaattggttagtgatttaataattggaactacttggatcatcttttaggtaaagacataaattataatattttgtttcttgtacatatatgtataataatggaccaggttgggtaatgagaaagaaaagctttactcataatccaatgagaaattacttttgtgaaaaaattattaaactacaaaaaaagttggccctttttaaaatcttactttgccaattttcaacaatggactgcttggaaaaatgctggtaagtgtgtttcgttcccacaggttgataagattcgtattaggtgaaaactgagaattgacgaggtcttccaggttgtcaaggaattagtttaattatgcttttgaaattgaaataggtccaatggtttataacacacaataaaatatcttctcttcctttttaactactaatatctgcaagagcatttgtatatctacacaaaagatttggttgttaagatagtttttgcatctaagatttgtcctctttgattcaaattcgagtctaatgtcgaacagctggatcgtatgaaatcatataataatcaagaattatatagttaattaatgtacttagaatctcatgttgattatgatgattaacgtccaagttcactcggtttttctgtagaacagacgatttcaaaaatcttccacaaagttgttacaagtgtgtcttatcttcataaaaatgcaaacgaaactttaagttcgatccgttttaccgaatgttcttcagcctacttgcaactaaatgggcctaaattgagttggctcaaaaaagcccatttcataaggagcctgctagagtcatcatcggtcgccgaagaatcagatggagtctaactaaagtctttcgatggaaaatccaatgtagggcatttaatatgcttgttgtgaaaacagagatgtggaatggatatttctcgaacagtgttgcaatgtaaaaatacattcgtgaagtctgatgattcgagattgatgcaggtagaagaaaacgacttcatctcctgttttgttacttcgtctctctatttacatgttcacaaacctaaacctagggtctagagaggagactaaaaggcctaactaagcacacattcttctaacacaagacttgctaatcaaaacccaatcttgctctccttttcagttgttattgttgctgcttatcttacttcgtttttgagtaggaggtccaagaggacctaagcgcagagatagatcacattcacacccaccaaaggtaatgccatttgttgcgtcaatgagactcgccggtctactgttcttggacttacacgagtcactgattggccggaatgaatagcataaagggtaggcagagtacttggagacagggcaattctcttgtgctactgcaagattctttggagcaaagttgtttggtttcatgaatacttgggacaacatgttgtccaagttagttgagtcttggctaagataacatctcgggttaatgttccgttggctccttgaagctctccttggtgtgcaccccaaatgcaatgcagctacataataaacaagacttgctcattgatctgagccaataatccccgaaagctcgaatatacagattgtattgtataccttcaatacaaggctgaagaaattcccctgtttcggtggtctcatcaagtcgtatgattgtgttgatggcgtcgtttgtacggtctaaaagggtcttcatgtccatatactcagcctaacatcaaacccacaagaagtatataaaatattcatattccaaatgaacacattagctacaaatccactctatcaactccataaaatccaaggtttagtacagattaccagagactatcagtcacactgttcaaagagggcaataaaaagcaaaaaatgaaaatcgaaatactatttagaaacaatcctttgtaattaaaatgttggaagaaaaacctcagaattggctttggaatacatgatttcttcagctctcaagacaacaacagggagcttctcttgccattctgtgtttttcctggtggattggctgtgaatctcacaaacaatcctacaaatagttcaaagaacaattgagctaaagaaagacatgcacacacacaaacctatagatacacagatagatatccaaagtgagagagagatgatgatgatgacctgaaaatctcttggatgagcaaacccctcatgggttggtgtctgtcactatgccaagctcttctgatacagtcgtacggtcttggccctggcctcggcatcttccaccacttccttttctatgagagagagagagagagagaaaaaaagacaaagtgagattgttgttcttcactagttttcacttctcaataatttatttgagtgtggtgggggagagaggtagtcctgtccaactggtccggtccggtccggtccggtttagtctgcctaaacttatcatggtccggcctactctatgtagagttgcagtccaataatttactaaaatataactaaaaactctaccattcaccaaattatttaggagttttaggcaactgttggagtgattttgaactgtcaaatttaaataagacacgtggataacttgcgtcaaatcacccagtccagtgaggtctcaattgattgcatgtcttgtgaggaaaaaagaagaacgacttaaaaagcataataagtatgatttttctctacaaatcacaaaagaagatcgtatgattgaaagtaataataaaggaaacaaaatgaaatcttgtgaattgctttcgtaccgcgtctaatcttttgccataatttttcgctgacactgaaacattcaagatgacgtcaatctctttattattaaaagggaaatacaaattaaaattttgtttaatttcgccttaattttgattttaattttggattttgttctttgctattcaaaatcattatggtaatttggtcttaacaatctacttaactttatatgatccgattcaatctaaaccgttcaataaaattaattccgttcaacaaaaataagtaaaataattttattttttttatcttcactttaaagacatataattataaataacataattcatatagtctttacttttactaaaattacatacacataactaattaatacatattttaatacattccttttattactaaataacaaaaaaaaaaaaaatcccaattattatttagttatatttaattaaaaagttttatatttataagtttaaaatatcaaattcattcaaaaatttagtataagaatcaaataaaccgattgtccgcgaactcctagtaaataaataaaaaatcagtgaattgacaaactaaaataaaatctcgttgctgacaaataaagtaaaggtctaaaacattaccgaagacccatcgtcctaaaacttttcaagtctgaactcaaaaactcaaaatgaaaaccaccttaaggtttctcgtcgttagtgaaaggcccaaaaactcagatttttaaaggcccaaatctattgcatgtcgaccacgtggaccaccgtacagagaaactcgtatccaacaaagctgttgccttcgagacggaaacgtttcctaaaacggatcgattacgaaaattcacgcagccacgtgatgtcattagaaagcttaccatccaacggtttccatcaatccacttgtaagactaagaaccctccacgtaaatcgaatatttttatgactccttcctttaatgttagctttgaacacactaatcaaacgaataaattctttatacatacacaatcacattatgtgtggcctatgatttagtcagatttatgacaaactgataaagtacaagaaatgataaccaaatagaattcaattcatatatactcttttcggataaacagtacagtgatcaaaattattagaattagtggccaaataaaactaagaacgttatgtatattaaatgacaactcgagagaagacgaatacttttctatataaagatgtaaaattccaaatatgaaatgccattgaattatatatttctataattagtgtactcgaattaaatatataatttcttaacgtaataataagatacaacaagttgcaccaaatcccactctctcactctagaaaccaaatgtcgttgataataatagaacactttctttctctctctaaaaagcaaaagtagtctagtcactgatttcttctaatcctccggtggagtgagagatgatatctccgacgttgtttcctctcctctgcgctttatttctatgtcttccagtggctgttatcttcacagtccagcgagaactcacctgcgttatctcgccggagtttggtttccgctctctttccgtcttctctctttactctcgaaatgtccccgactcttcttcttcttctccggcggttcggattcgacagccgattcccaaagaagacgaccctcttcttcgactatcttctcgggttaacccgaatctacctcccggttcgacccggaaaatagcttttatgtacttaacgacgtcgcctcttccgttcgcgcctctttgggagatgttcttcgacggaatctccaagaatctttacaatgtctacgttcacgcggatccgacccgagaatacgacccgccgttctccggcgtgttcttgaaccgggtcattcactctaaaccctcgctgagacacactcccactctaactgcggcggcgcgtagactactagcacacgcgcttctcgacgatccattgaattacatgtttgcggttatatcaccttcatgcgtaccaattcgctcctttgacttcacttacaagacattagtctcgtcgcgcaagagcttcatcgagatacttaaagacgagccgtggcagttcgataggtggacggcgattgggagacacgcgatgcttccggaggtgaagctcgaggagtttcggatcgggtctcagttttgggttttgaaacggagacacgcgcgtgtggtggcgcgtgatcggcgtatatgggtgaagtttaaccagacgtgcgtgcgggaagactcgtgttatcctgaagaaagttactttcctacccttcttaatatgcgggatccacgtggatgtgtccccgccacgcttactcacgtggactggactgttaacgacggtggtcacccgaggatgtacgagccggaggaagtcgtgcctgagctggtcttgcggcttagaaagactagaccaagatatggtgaggatggaatcaacggttcggagtggtctaaggttgagcggatggatccgtttctgtttgctaggaagttttcaccgcaggctcttgagccgttgctgggtatggctcgaaccgtcttgttcaatgactcagccggtggtgtgtgaatggtttctctaatggtattgttgtaaattcagttttagttttagtttttttttttttcttttttgtggggaaataataattgtaatttaaatgggtagctgggaaaaacaaaaacccgagtataccattatcgtgagtaaaaaagtaaactcgtcctactcgaatctcatcataatcttcatattagcaaatggaaccaattcattaccaaatagccacattgaaaccttacattggatacgagaagatatttaatggacatttgacaaaagtagagatatttattggactatgaatggaaagtgatgtgggttttgagttctgactatacactgggtttatgtaaatgtacactgtagatagagtgaataaagaaactaggagaatgaaatggataaatgtagagtattaggttgtttattagaactaataattatctaaatatctagtacggggtctaagtttgcggaagatggggcttagattcgtcaacactcgagtttggttgtcccttaaagaccacacacccacaatcatcgttttcctcgtgcttttcttgtcctttttacttttttcaaagaaatatgtaaaagttaatggaaaattacagaaagttgatacctacaagccatgatcgcgtgatagacaattaaagaataacttgctataacgaaacttgtatgtcagtgactttctctttcgttaacttattttgctgatttagtttcatggttatggggtataaggattacgattatgctgagcagacacttagatttaacaattcacaaatctaacctttagttagattttacaagagaaaagaatcgactatcgaagagatgcaacgaattaatggtttttgttcttcactgtcttcctctgttttgtggttcaagcggtaatgaagttctcgcatgatgcgtttacgaaaccatgatagggtttttctttgcttatttttagtgaggtttattcaatggttttaagttatgtagaatttcattgttacaaaacaccatcattttctggttaaatttccaaacttgtaatacatacaacatcgatacggaagtatcatgaaaaggtgaattcaaatactggttttccttctacgttgacaattttttcattaatcaatctcttataggtccagtttctctatgatttttagtaaatcacagacgcattctgtgaggacgtttacttcacattggtaaaccgctaaaatcttttatatattaccatgtatcactcgtgattatgaaatgacaaacattgattttgtctttttattttgtttaaattcgtataatgacgtatcaactacagtgcataaatgaaaaaaatactagatcaaaagtccaaagtcagtttatttgtttttctttgaagagaatatatacgtattagttgcagatttattggcaaaaataattatgcctgttgttatcatatatttggagttctcatgaaaggataaaaagtttttggggaccaagtgatggaattaacgagtcaacttaaaaaaggggaagtgcaatttgaggctccattatcttcactaaaaacatgaggatgttccaaatttcaattggcaaaatgacaaatgtcaatgaccccaatacgttgaattatactagataaattccgttatcttactgatttccttctctttatcatgtattcattcttaagcttcacctaactccaaccaaaccaaaccaaacctagttgtgtagcaagaataacaagaaaacaacagatgtataacttcattattcatcaatactcaaaagaggcaaaagtctcacaggttcaataataggacgcaagatcaggaacaaatacaagaaaaaccgcattataacacatctacattggtcggaaaatatatgtaagaaaaaagcaaacaaaatgaataaaatcagtaagggttgttgtagtaataacccatcggcgacggtcccatcccgttaaccggcggcataccataaggcattgcggtttgggctgtattcatcttagccaaactagcttgacctctcattccttcttgctgatattgctgccataattgctgctcttgagtcaatagatattgctttttgtccatctcagccatttgcacataggaaggaggcggaatggtcagggaagcagcgaacgggtcttggttcactttctgaacggttccatctggtgcagggagtgctagtatatggctgttgactttacccggtaaagggagtgcaacgctgcttgaacttccaccagttaactctgaggtgctcacgtgttgtctaactgctccttgatcgtacattccgttgagtaacaatgggtctaaaccaccacccattgcggctttctgatgttctagattactagctgtctcgaccaatgctagttcccaatccgccttcccaagctctgctgctggattctgccaagccgatgtcacgttgttatcagaagagaaagcttcccattttccgttattagcgggagggccagcaaaaagcgcaagagcaaacttgtttccttggtcatcgccagagacatcatcttctctcaagttaactagatcatctgttacttgtggttgctgcggtttaggctctggtgcaggtggaggtggaggagtgtgattctcaggaggaggaagcgctttgatctcattcatatccactggctcttccacaggaggagcaggagcaggaggagcttcaatctctttcctctcaggacttttggccctcttggctctgtctctcacaaactcttctagtgtctccaacagcttgctcgtaatcctctgaacctcagggtactcagaagatctcgccactccagtatccttacaccaatggtaaaacgcaatgagctcatcaatctgtttagccgcactagcataagcatcaaaggccttaacacaatcagtatactccatatcaaaaaacttgtcaagcagaacagccaagacctcacagatgtcagcgtaaagcctaaaactctctttcacaaccgggtacatggcaatcaagatcatccgactgtttttggctaaaccagtgggtcgacaagataaaaaccgatcaagcagcctctgcaaatgacccatctttccaaaaatcctctcaggtgtcatctctcttaaaggagtaacagatttcttctcctctcttgctccaatctcattcacatctccaaaagacctcgacctcttaggcataccaaaaccattaccagtctcataatcataagttcttggaggaggagacctaaaatcatccctagatcgattatatccatcatcaccattactttggtgactactactactaccaccaccatttctccctcttctctcaaaaagagccaattcaagcctctgatccaagtaactagcatatgtcctaacgaaagcagagtgatcccaagagctagaatgagcctcatcacgaaaatcagacatattaagaatcctcgtacctcgtcgtgtagcgtagaggatctcttcctgaaacagtggatctccttcgttaagaagacgatggacaagcataagagccttgagagcaacgatccagtcacgcgtcttcttaagacggcgtgaaacagaggtgacacaggcgtgaacgtagccacgggagagtgaagttaagctaaggatctcgcggatatacttgtcactagattgatcatcgtcgtggcttgtagctttcacgatcgcaacttccagatctggagccatgttgctagctaccttcgctatgccgatactagtctgatccttaacaactccgatcgcttttcgcatgcttagcgccatgattccactactacttaaggattcgaattcttcaaaaaccacaaacaaaagaaaaagtagcaatttggttgagaaattaatggagaatccaacgagaaattgtgattgaatttttctttggagataaataccgattcgctagatctgcggggggagagagaatgattaagaggtggtaggtagaagagaaaaatgaagaagtcgccggcggaagataaggagacgggatcgggatctgagatcaatgaagaaggtgaagaagatctatcttttctcaaaagagaagatgactaaaggagcagattcgccgaaccagtcaaaatgaagtgtctaaagacagagagacaccaatttaataagagagttatgagtccaagctgacgtggagtgattagagccgtcgatctgaagagacagatagagatgcgaaggtttggtttgtgaccgggattgacgggagccgtgtgtccgagagagactcaagtctgaacaccgaacgtatcggtgaagatgtcttttctttttgttttgtttggtaattaaataattttcaatttttgtagggatctttttacagttgtttgattgtttcattcataactttagtagatctaaagttgtgtttctctaaatttcactaaaatatctattttccttatataaagattatgtttgtcatattatttaatttaaagattataaacttatgatataattttatgcaaattgtaaatataataaccattttaataaaagattttcttatatatcattcattattgattaatattttaatctaaattacgcattttaagctaagatcaataatattcattttaaattttgttatcagctattcagctaattaaattgtttaagaaatgtatcagtttttatgtcattttttttctgtttactcatgcttttttttttccccttgtttactcacaatttaaaatcgtactccgatctaattcaaaccaaaatttaattacttggaaatctcttgaatcacataaagtgacatacttacttgtgtaaaacccggacgtccgcaaccattacattcttatggtttctcaatcaaacaagtctatgaaaaaaaaatcaattcggtacacacaaaaagtctaacatcttaattattatcagctagtctgtctttgacaattcatgagttttttttacttttgaattttctttagctttttgtccatgtgttagccatggatcagataacaacagattataaaccattggatttgatactaagaactagaagaatagaggaaaaagatcgagtggaaatttaatcaaatgatagacattttaattacaaaataaaaaataatggtccgatttgaacgcctatccttaaaacaaacatcttgtatatgcacacggtcgatctctaattattgatatccgatgaacagattccgcaaagatcctacaaaaccaaaacaacaagttaagtatcaatatataagaaagagagtatagtagtcattactcaataagtcatttttcttgaaatatagagaagtaaacttacttccatgtaacatcccctcgaagtagccagtcaccctctttcccttggaaggtgaatgtataatttgtatcttctctgtcgcaatcttcatctgataacccaaaattagattcaatagtagtaaaaagttacgttctattttcaattgtttataggtttcttactctagattttgataaacgtaattagtacttacattcggtaaacatagtgatcaaggagttagtgagggactcgtaagagttaaaaagcttgatatccacttttcttgctattgccacaccatccatcttaaccttaacatacattgatgatcttgatgatattgacgaagaagatgatgatcccacagtagccgttgttggattagatatgttgttgttcatcgccgtgatcctcctaccacgatgatgatacgggcaatgatggtgattacgaatatgacgatgatgataactaccatactttatcatacatgtttttactggtggccatccaacaacttcgctattttcctcctcatcactaaatattaaaattaattatatgttacaaaaaaatacaaattatgcctctccattgagttaactacaagtctacaacatcataacatttttgaaaactacggagtcatttattatataataatactagatgtaactactttaacctaattgttgtcaaatactaaaatagtcaaggtactcactcgtaaactattgaagactcggattccagaggatcttcgtcttcctcgttgggctggccattcaaggcaaacaaacgctgttttggcatataacaattttcctccacattccctaacccaaacgtcgcctcaaaacgcagtttttcggtacccaaacaagacgcagcaccctcgatcgcacaatgcttgttgaggtcaaagttaaaccctaacttggaagatttatgaggtgaaagagatagaccaagatccaactccatttctaaggcagcttcgtctttgatgaaactaaaagcttttgttcttttattattggctttggaaaaggttgtgttcgttggtgttgattgctgaattagaggatcatgagtattcctatttatagtaaaaggaaatgggggcagaggtcaaggagtaatatatggctttatcaaaaatatacatatatatgtatataatattatgtacattttatgtaacccacacaaatatagatgtggatagatggtatcttaaccaacacgctactatttattctaaacaactaaaacagtaatcattcaagtattagaatatactagtaatttatatcgttaaattctgaacttttagttctatatcttcttggcccataatatagaacatatagttggctaggataattattatcttaaaatgtttcatagtagtatgtaaatctagacccaacatgactgaagtaacgtttcaccagataacttatctttttacgaatattcatctctataagatccaatgaagtacgaaatcatatagtttaggaagtaacacaaaaccaatagtctataccaaaaacaggtgatactaaacagttttagattttctgatttttatgaatatatgaaatttatggctttcacgttaagcgaaaggtagtgaggaagttcctagttctccgaaggaaaaaggtcttttgggagagaagtaatggcttccgacattgattaagttcgggtcggccaatatcccaacattgatgctaacacatttttacattattttatctaaagttttatgcttttctgctttaaatacatcttataaattttatttttatattcaagatccaccttatctacactgtataacaagttctcacctacttttaatttcaaattttgatcaaaacataacattattacaaacgattatatcataaattccgctcattatataatgagcaaaacttgcaaaataaatttatggaaggatttacggctgctaacttgtgttagatgtgcgtctttaattcatacttttggcaatatgacaatcaacatattttaaaaaaaaaaattaagcatgtactaaaagaatgataaagtgcatctatactaagaaataagaagatgcatatttcgtcaagagacacatgattcaacgaatttagacatccaacatcaaaccaacacgaatattagtaatagacaagtttggttaatgttggaacggacaacgtcccatatttttgtttacattctatgtttccaatagaaaatttggtttcgcacggaaaaggtggaatttaagaatcattgtatacaatactataaatgtgatacttaaactgataactgtaagtaatactcctagcaaactctgatttttcagcttgtcataacttttgttaaccttttaagagacaaaactatcactagacatttatagcttgactcactatacaagtattgacttcatcagttgcaattttgtggggaagagttggatcaaattatgaataagggctattaagtacggtttgcctatcctgaggtactttgctctatatgggaaggaacatagttattactttttataaacataaattttgacaactgttgtttttattgtaaccaacaaattgaggatctttatagcttatagtttctttggattgattacgtaaactaattgaaacgactagtacctcctcccctatttgactaggatacaatcatacaacgtaacaggttgaattgccgacatatgattttattaaaaccagtgtttaaaaactgatattagactatctggtcgaaccaaattcatttataaacaaaataaagcaacacaattaccatgaagactagaaaaatacgataagtaaagctataaaaatatggtgttgtttcaatttttaattatcttgttttactcttaatattagataatgatattttagctgtatgcttgacattgacatatgttttgtttccatttaagaataaagcactgttggtacaaggttatatgctgtgtcttaactcttaacacaatattataacttaatccacaacctttattaagaactaatttcgtaagatatggatttggattacgaaagtgactgttgagtatgaagtctatatcatatattaatatgaaattaggttggtctcttcatgttttttagatcaaccaagcagaagagagtagagggggaaatatcaacgtgaatgtcacgtgaacggagtcgtgcgtgcgtgactactcgtggcgtaatgtcgggtcgaccactgaagtaatgggctttaaaagttgaaggaccatatccatatggctcttgtgggaaccactttacacttagtcttgctcgtgggatcgatctgttttttgtttcttccttttgctcaaaattgatctggttttgctattattatatcatgactactagcaaaacttacatttttacttatcccatcaacattttcagatcaatttttttgtaaacaagattaaagtgaaattggactaacaatgattttcaaattaggtgtgtatgccctgaaactcagtatctgcttcatcccgcgatcttccaaatataagaaaaaaacggtcacctaatttaccgacaacaaacctaatccactaagacattattcaagatctagaaacgaaaagtcatgagatataaagatgcacgtgggaggacaagggaaaggacagaaactgtttggttgggagacaaataagtgttacgaaaggggaagtgaataagtctctctttaaactcaaaacactgagaaaagagtttgagtgtttttgtgacagatttggcttactgtcttgtctccgtcaagttgtaaataccaaagtcttatcatgttttttctctgtctcctctactacaattttaagaattgtaccacaaaccgatccattcattcatcatccaagcttcttgattcaaactggcaacatgttaactcgttatagatgatagtttggtgagttctataaaattgcgattaaagttatttctcttacaatttttcttggaacattttatatatgtataacttgtacatgaacgtagctcaaaagctaagaaaaaggtagcgccataatcattatgatgaataaaataaaccccagtttctctgaaagtgttggtttttaccacaccatattctagaagttaatttattggggttctaccacaccatatgcaccatgtgattcatgttattgttctaattctaaaactttcactgcgattttaattataatggttcactaatcactatgaaaacattagatgaaaattactaacacgtgattcttccagaaatcccgaatctctcagttacacaaaaagtaatatttttgtcatgacccagctttttccaatgccgtacataagcatggggacaggcaactaaaaaagctacaccaatcaaggccttagttcataatcgaacaatcacgtttagcccaaactttaaatgggcttaaaataatgtgggccttgacccacaaatagaaaaacacgtgacattccctctttgataatgattgcaaaaaaacagaggtgtgtttactcaaacgtttcccgtgtcctctacggtcagtatcattctttcggtgacgctaatttctccggtggttggaggagaacaaagtctcaaagagacggcgaacgaagacgaagacgaggagcgtggagagagtagacggcgaacgaagacgaagacgaggagcgtggagagagtctacctctctcgacgatgaggaataatcctgtccttccggtttccgatcctcccctcgccggtgagaatgatagcgatggtaaaggtgtcgatgatcggcttttcaaaggatctgccatgaccaaacgtggagcttatgctgctctttcttacatggcttgtgctggtaatttcctcgatttcacttgtatcattgattcgaatcacgtgttttggagtagagtccagttctggtgttttctcggattcgattctctggattccgtagttcgtgtttagattcaattccggattttggctgatattgatgcaaccatatcgtgatgaagattgggatttgtttgctttgtcaatgttcactcattccgaaattcttcgtcttacatttgtacatcgatattgatcagaacgccttccagttttcctatgattcagttacctcacctacacaatcgcattgttgagtagtcttgggaaatctcattgtgtagttgttactgaaatgtggcaaatacgaacatggttcactgttttgttgtaatcagatgtgcctcggggttgacatttgtttttttgttggatgttgattcacagttatgcttgtgctgttcaataaagcagctctgtcttcctatgattttccgtgtgtgaacgttatcacgctattccaggtttagtacagagattctgtttttccgtctcacttatgatctgtgagactcatattttcattctctacagaaatttgtcaatatctaaaatagctggacacttttgttttccacagatggtttcctctagcttatttctatatgctttgaggcgcaggaagatcatctctttcacagctgctgattctttttctattgatagtgcctcaacctttgtgccagtgaagacattgtttcacacccttcctctagcaatagcatatcttttgtacatggtaaccattttactgaattattttggcattttttttactgctgtttggatttcgtagatagtaactgatcacaaatttgttcgatgtgtatctcttgaaagctagcctctatggcatctgttagaggggtaaatgttcccatgtataccacgcttaggcgtactactgtggcatttactatggtgattgagtacatgctcacaggtcagagatatacacggtctatcattggaaggtaaatcactttttttttctttcttccatactgtagtttctgttcgtgcaaaattgatatcttttcactgttgaatttgataatttcctgaagtattcagattctgggtttaatagtatctcttaggaagaaataactccttatgtttgatcaaaatagacaagaattaggatttaggagtttgcgagagataattgtagctctacgtttattctgtatgttacatgccccagaggcttatgtggtatggtgctttaagtccctccatgaaaaagtatgcacatgttattacctctaaaaggagaatcatgctccttgactcttacatgcacaactaaactcttgtaaaattgatgtcagtgttggtattatcttgcttggcgcattttttgctggagctagggacttgtcatttgacttttatggatatggtgttgttttcttagccaacatatcaacagcagtatatctagcaaccattgcccgtactggtacactagttactcgctctctgaataaattgttttactacatgtcctcctgccagagtgaaatctctcttacccaattctaatgtctggttctccaggtaaatcaagtggcttgaatagctttggccttatgtggtccaatggtaatataaactaaacagataactaaattgaccctaaacactcaagacttgctttgaatttgtgagattttcaatgataggaattatatgcggacctatattgatgatttggacatttatttgcggtgacttggagaagacaattaactttcctcacctcttaactcctggtttcatggtaccgtaaatcattatttgccttatatctgtccactttgcgtttgtgatactgatgatctctttttctgttatgttctcacccaggttgtattactctgctcgtgcgtgctggctttcgtcttaaactactgcattttccttaacaccactctcaattcagctttgacgcagacaatttgtggcaatatgaaggttggtttcactttattagtatctcctgtacaaaagaaaaatgtgaaactaatctgccaaggagagactttgaacattatatcatcgttgcaggatctattcacggttggactaggctggatgctctttggaggactcccattcgacctggtaattttcttcaacattcctattattccattgaacctaaaatcggcatctacgtttgctacatctcactacctttcttttttggttcatttacacagatgaatgtgattggacagctttttggtttcttcgggtcaggtttatatgcatattataagatcatcgggaggtaacaagtccaaaacaaagaaaagccaaagaaaacatgagtggcctagtgatgataaaggctcattagtttaaggaaaagttgttgactagtagtgttcaagtggagatagagtgttgagcttttggttttggaggtgactttagagtagtattaataatgaaaggcctaattttttgaacttgcgtcttgttcttcttcagttttcaacaaggcgaaagattagactatggacaaaactgattttctatttttttgagatctactgactctaatttatacaactgcttcttttcattgtatatatgtagtattattatacacacttgagaaaaggatgactgtaattatacaactgcttcttttaaagcgttcaatgatgatttggtactaggcattcttgcaaagagctcggtgaaagcaaaaataattacttcaacggttaaaattgcaagtactagaaaagaaaaaaagagcacacccagtgggactcgaacccacaatcgcttgattagaagtcaagcgccttatccattaggccatgggtgcttgttgctacatccttctgagttgttttatatatcatataattgtatttgtaatcgtgttccataccttcttcaaaagcaaaacattctctcgccggtaaaaaagcagagatcccttaaccatgatttccttcaaagtatattccccttcctcatcctcttcccatgctcatggtatcaatcttccactctgacccaactcaagctctgatttctcctactccgtcgccaaaaatcttggaagtagatgtcttagcccgggaaaatcaaattttctcaataatcaatctatggacgttccaccacgccgctctttggctgcgtctctctcgcctctccggctaatcgatggactccctcgtcggaggagtttcaattataatcagatgcctgaagagcccatcaaactcactgttctcaagcttgatggatcttcctttggtacccattactcatctcctacttgcttttaccattaaattttatatgttaactaagaatgtttgctcaaaagaactaaaagttattgctttacaacgaattctagttttttctgtgttgtttcgtttgaggttgtccagagaaatttgactggtttctgaatttgtgatttagtacaattccctttaagcgtaatttggatttgtaggtattcaagtgttgaagacagcgacagtaggggagctcaagatggcagtagaagctgcgttttctcacttgcccatctcaggccctggcaagatctcatggtaccatctctgattctttgacttgagttattcttataatgattccgattttgtgtctatattaggataagtaactgctaaatgattcttgatgatcctatttttaccctgtgattataaaggccgcatgtttggggacaattctgcttatcttatgaagataaaagattgattaatgagtctgagtacctcactgaatttggcattaaagacggcgatcaggttacccttttactctttctttatcacttgaatacatcaaagagtctatgcttatgatattatttcatctttacatgtgatgtcgtagaacgatgcatttgggtagctagagtctctaacctggattatgtagattgttatagtccagtttagttttgacaacatagtgctttgttttgatgctctataatgtgttttatctgccatcattcagcttcggttcatccgccatatctcaaactactgcatgttaatggtgaagcataagagcaagacaccccgtgtttcttctttcaaacaactcaaactgtaagaacttttggtgttaaaatgtttttagcatttcattatccggaatctccatagtaatacatgtttttggaccaatcaggttctcaaccacaccggaaacccggaaaaagaacgtaataagggaagttgaagaagacggtgttgttgactccatccctcggagccaaccaagctttctagcaactgtattgggaggtttgctctcttacaagtcgacgccaagtcaacgaggtactaaatacagaaacgtgactgcaagtagagtttttaacaaactcattgcaaggtttcgtttcaagtgtaattccgagaaggatgtgtggaacagaaaaaaactcatatccgaaacctaaaaaaaagcactccttttctatcatttgattcttgtagagattttgatttcctaatcttggtgtttatatacaaacttggatgttgtgtgtgtgcaaaatgaataaggcattgtgtatttacgtttgtagtggatataattgcaaccttaccgtcttagccattttaaccttatctggtacagcgttcgcgtttgcgtttgcgtttgcgtttgtgtttgcgtttgtggccaaaacgcaatcatttactttttaattgattttccgctccattgattttaatctgacgaccacagcctttagcttatttgtgtggcgaagagaagagataacattcctaagcaaatctcttctctctcccattcgtctccaaagagattacagttttgagcatttctcatctctcgaagctcttctctgtgtgtgtggcgatggctgctaattcgataatggcttcctccaaacccctaatctccctgtcatccaaccaacaaccaaaccgagtccaaattcccaaattcgccaaacttccccaaattcccaaatccctcacttcctccaccgatctccgtagcaaagcactatcactctcctccgccaccgccaaatccttagctttaatcgccgctttcgctcctccgtcgatggcggaggcgatggagaaagcacagctcttcgatttcaatctcacgcttccgatcatcgttgttgagtttctcttcttgatgttcgctctcgacaaggtctattactctccgcttggtaacttcatggatcaaagagacgcttccatcaaagagaagctcgcgagtgttaaggacacttcgactgaagtaaaggagctcgatgagcaagccgccgccgtgatgagagcagctagggctgagatcgccgccgcgcttaacaagatgaagaaggagactcaggtataaaagaaacaacaatgcactcagagtgaagaaattggtaaatggattgtgtattttttttgcaggttgaagtcgaggagaagctagcggagggaaggaagaaggtggaggaagagctaaaagaagctttggcgagcttggagagtcagaaagaagaaaccattaaagctttggattctcagattgctgctcttagtgaagacattgtcaagaaggttcttccttcttaaattatatttttgttaactgtgtaattctctgtctctctatctcaaaacttatttacaagaaattactgtaaatctcttcttcttcttcttctctgtttcttggattgttcgtcgttcaaagaagaacaatttttattttgtaagtttataaataattagctctcttctgtcattttagatgattaaagtacaagtatgtatatcgaggaattagttgttacggataaaatcttcatgcgagtcttatcgtcactagatttatgtctatttgaatcgattgaacaaaaacgcaaatggcaggagttgcttgtgtaaagagtagagagaaattgagttttcagagccaaacactccagctttgtccgaaagtgttcatagaaagttaagttgactcttccataacgagctcaggtccaacaacgaagcccaaacctcagttactctatcttattattgggccctaaaacgaaatgggccctaaagctaacgcgggtcggtgtttgattaaaacaaatgacggggcctccacgccttgttccttcttcttcttcttctcacgctcacggttctctttctcttctctgtctttttcagcttctgaagttacttgtttcagttcccgatgatcaattcttagtttttttggcttgttttcttcgtctctctttcatcaggcctttggagttttgtgttaccattttcgctcgcgtcattactggtgttagggttttcttcaaaagcttcttaatccgtcgaaattgctcttttctctccctcattgtcggttactttctttgacccttctcttatgcttcgtaagctgtgatttttttctctggtttcattgcaactctagttcaatttcagtttgatttcttcgcttaaatattttgttctatgagatctgagagttgtctttattgttggcttatttcaatcaaaacattggctggttaactttgattgactcatgattgattctatctagcattaattggttttctttgtatttggttactgttacttgttcttctacttctccacgattctacttctccacgatactgtctctgtcccttgttcgtatcgctaacttattcccatagtgggcacgtctctggtttctgacttttctcttcaattccatgtattgcgttttaccatgatgtttagtttcggaatcatttcttgctttctctatctgcttgtaagaatagttaacaagtgagaggaaagtcctttttgttgcttaaatagtttgatttctgttgttgagtttatgcgatatcccaactggtgaaactgtgtttattggttcagacagagataaatggcttcaaagattattgctggcaagccggatgataccgagtatgaaatcattgaaggtgagtctgagagcgctttagcagcggggacaagcccttggatgaattcatcaacgttgaagcttcgacatcgaattggaagaggtcccttcggtgatgtttggctggctactcatcatcagtcaactgaggactatgatgagcatcatgaagtggccatcaaaatgctttatcccatcaaggaagatcaaagaagggttgtggtagataagtttgaagatctcttctctaaatgtcaaggactagagaatgtctgtctgctcaggggagtctctagtatcaatggaaaggtaagtgaaacaaacatgtgtgtttctctagtttcaccgtattttcaatttttgtttaatagctgatttgtatcgtgtagatatgtgtcgtcatgaaattctacgagggctctcttggtgacaagatggctcggcttaaaggaggaaagctttcactgccagatgttttgaggtaattcttcattacacaagtaagaagctcattgtagtagcgtcttcttcattgtaatatagaatactaatgtctttcttatttatgtgaacctcgttttacagatacggggttgatctggctacagggatcctggagttgcactcaaaagggtttctcattctcaatctcaagccctctaactttcttctcagtgataacgacaaggccatcctcggggatgttgggatcccttatctccttcttagtatccctttaccaagttctgatatgacagagagacttggaactccaaactatatggcaccagaacagtggcaaccggatgtcagaggtcccatgtcctttgagactgattcttggggatttggttgcagcattgttgaaatgctgactggtgtacaaccttggtctgggagatctgccgatgaaatatatgatttggtggtgagaaagcaagaaaagcttagtatccccagtagcataccgcctcctctcgagaacctacttcggggttgctttatgtatgatcttcgaagccgaccttcgatgactgacatcttactcgtcttaaagaggtaaatcatatcttgacaccgttatatattcagtttgaacaagatcgatttagaagtgtttatatttcattatgtatggtcatagtatcttcggaaaatcccatagtttttatagtttcgtgtctgatgttttaatatttttttggaatccaatttctttattcttgatggaaattttaattggctacctttaattgtgatattgactggaaccgatttggcagcttgcagaactcggaggaggaacaggtcaggagaggcattgatagtagagaaatcaggaagagctcggctactcttggttatacagaatggtttctttcaaaggatcatctgcaagtgcgcgacaccgtgcgttcaagaaagcctgccaattcgtgtaagcatgagaacatggatgtgccagaaggaatggtggttggtttagaacgtgactccacagacccagatggatttgtgctagttaaagtccatggtgtacatgatccattaagggttcacgtatctgttcttgaacgggtaactaacggcttagcttctggagattgggtgcgtctgaaggtcaggaaagacaagaggcactctccggttggtgttctccattcaattgaccgtgagggaaatgtagctgttggatttattgggttgccaactctctggaaagggacatcatcgcagcttcagatggctaaagtatacagtgtgggtcaatttgtgaaactcaaagccaatgttgtcatcccgagattcaaatggatgcgtaaaggtagaggtatttgggcaactggcaggatctctcaggttctaccaaacggttgccttgaagtggacttccctggaatgttaccttttggagaggaacatggaagctatcttgcagatccggctgaagtagagattgtgaatttcaatacatgtcaaggagctgtggaaaaatatcaacatctggaggattttcattgggctgtgagacctttgcttattgctatgggtctattgacagcgatgaagttagggatctgtgtcaggaagaaaataggaaggtcaaaggatgggaaacaacgcgatggctcgactggacaaggtgactgtaagattccggatggtaagggctctgacaaatctaaatggcttgtgttcttttaggtctgctatgagacacagaccttgtctggtccatatattatactgttctagtcataataacgtttcatgtacataatgacgtttttcttttttgctctttaaaattaccaaaaagctttcacgcaccaagtgttacttgcaatttgcttagacaacgacttcttacaaagttaagtatataattacgatagccatgtaattggagatcacagatgtttttatatttattgattaagagagcaaaaaaaaaagaggcagtgttgcatttggctaattccgtgtgagatcaatgaactattcaaattctacttattgaagaacacatttaatctcggagcctacttgaacgactctcttaaaacatcacatggtatatgcagcgtccattacaagtaataatgaacataaccaaaccaaaagaggcaagcttgcatgattttgatgtccatggcatttcctcaacttaaagcaagaggagaagacccattattgaacagtcaacaagagcacagagaacccaaattcgaactacaagtagggaacaagggagttagcaaagatacagatgaccttcattaatcttaaaaagtatcagcttgagaacataggccacaatgagaatgaagagagggactaaagaggccccatgctctgtctggtgtcagcgctacatggtccaggacaagtatggacttccccaccccccggagacagaaaaccagcgtgtaattctgatcaggaaactgaatccagaaaggtgttcctccttcaggcatttggaccacagaacggcatgagctactaggtaagcttaagcttgctcttccagtttcgtgcaatacgaacatagcctggatcaatacgacttcttcttttaatactacttgagccacaaccatctgaagaacttgatgaatacagagacaaccgatgccacaaaatgtaactaatacaaaagccctaggtacctgcagtaacagaaaagataatatattccaagcaaagacagtgtgttttgcagtagtctccagcactttgatgcagatggtactttgagacagtatgtgaggaaaagattttggtgatcaattgttttcaacattaactgatttaacacaaatctttcattggcgacatcatagaatagcgattagggtatgaatttgatcacaagtgtctaaacatagataataagattatgacatgaaacatgacacaactagatacatgaaaggattaaaagtttctctccaccagattggaattcgtcaatgagttcttgtttgattgccaacaggtcctttgtgcataccctccaaataatttttcagtttctcccaactttgcaacgtagattcccaatcctggaacatggaaaaggcaaacaattcaaagtctttacttcttaaaatctaaatgagctcaatgtaatccaaaaaggattttacctcaaggttttccctaaactcttcgttgtcaataggaaaaaaatactcagctggaacaaaaaaaaaaaaacccaattcttaacaacaacaacaacaacaggaacaacatcaaaaggctaaagaaaaaaaggagagaaaagaaatcaatgttcgtgacatacaggctttgtatcctccataacctgctgaacctgtgcctagccatttgcacaccatcaaacccttttccggcaatcctgctgctgcctcaaccaatgaagaggacatggtggagaaagttctatctttagattggccagacctcttagtgctataggatctcgttccgcggccaaactgtaaacatccatcaaaaataaatcaatcactggaaagaacaagaccaggaaacattcatatgattcatgtcttcggctcaccttcgcgcacacggatccgaggttccttcatatcatcatcgtcatcatcgtcttgctcctccagccgaaaattagggcttttttgctccttccctcttttaataatatttcgatcgattgggaatttttattatttttgtactactgaacgaacccattcaataactttgctaggtgaccggcccaagcccatacgtttatactattgttcttttctttttctctgttttgtgcaaaatatttatatcattcttacgaaaattgatatgaggtacacatttttaatttttttcatatcattttacttttagtttttcaaattttaaaaaccaaatcgtttctctattttttattattattattttattgctctaatttttgtttggtgagtatcaaaataattgaatgttcttcgaattatttaataagctttattgaaataatgaactttcctaaagaataaaattaattttgtaaacaattaataaataatctgtgttgctatgaatgaattacagcttggacgcggatgaagatcgtatatggctggtagatgttaagatttattattaaggaggagcaagaagagtgaaggcactgcgtcatttgctgtttttactgtgctattttctatgataattatgtttgatagaagaatttgatatttttttatttatttcttgtcaataaaccttaaacatattaactgaaaattctacgattttttaattaatcatagtttatttgctttctacattgttatattaataagattatatatatatatataaatgaattcaaattaaatatttttcctttttcttttgtcattgtagattttattaaaaacatgttggtggaattacataaaattagaatatttttttatttgtttatttcattaatattgttgacaaaaatagttaattaagtaattttataagtttctatcttaaattaatgtcagattcagcagttaccatttgaattctaaattattcaacgagattccacaaaaaatcacaaaaacaaatagtgagattcagcggttaccatttacacaaattgttgaattcattaaagttagagtcaccgtgtttagtacttggttcattaattatatagttctatagaggatcatgaaagttatgtataatctaatgcatatatgtaattagtgaaaacaccaaaaaaaacagaaaatatggtttagagggattgacatggcataaaaagcaatgttggatcgctgaattattttttcttggttcggtaggactcggtccaatgttggatttgcgaatcgctgaaataaagagttttggttcggtgggacttggtattggttgggctaattcagcgtgaataaaaaggcccaaacgtatttaaatattgggccgggtctgtgggaaaaaggcccaaacgtaaaccgaatcgtagattgaaatgaccggtctagtttcagtcttgttcgcgagcgtcgagagaaatcgagaggaaaccctaatttggcgagtggaggagcaagatgatgaggaacattggatctgcgtgtgcgaaggtaataggaaatatcggaattgattctcatgtttcaacggaggttttgttgcgtctcttatcttcctcaaaatatcctcaggaaccttccatatcgtaaaaacaacacaatgtaattagtgaaacaacaactagaaatagaatcatgtacatttatgaatcttaaagaaacagaacgtaccgcaaaagctgaccggagagttctatcgtcgaaacccaataaaaggtctctaacactcgagtaggctccaagacatggatcgtttaaacacttccccacattaaagattgcgtaaaccctaagtttctcgtttctatcgatgattaataagaaacgttgatctgtgttgcgatggatgaattacagcttggacgcggagggagatcgtatacggctggtagatgtgaagattcatcactgatgaggagcaagaagagtgaaggcactgcgtcatttgctgtttttactgtgctaatggctggctttgcgggacatttttggtacagaggaaaaggttaatttttcgtttacaaaattagaagatcacggttgctgtttgtatcttcttcctctcacaatcctttgttttatatatacacatatatgccagctactctagaacgcttagccctctccagagctattgatgaaaagagtaaaaagattcgtcttcttaaacgagaagtggaggcgatcgaactaaaggtaagaacactcttcgtttactagcccattagtaattctcctttgaaactgtacattttagcttttgggtaacacaaatctttgacgatgaagacaaattttggaaaacaaaatgtaattcgtttctcttcgtctcaggttcgctgaatatgtgatgagatcaaggagatcaagatcagtttgaagtcagaatatatatatatctttgttatctcgttgtgtacaattaattctctataaccaagtatggttttaagttttgttacttaaaaaagtgataataattatcattacgtgttggctgctccacatcttacatgcttgtgaatggttaaaaaaaatgatcactttgtactgaacctcgctttactgtcatctggctccaaagggtttctcattctcaatcttaagccctctaactttcttcccattgataacgacaaggccatcctcggggatgttgggatcccattattgcacagacaacaggtgacaacaagagcacatagaactcgaattcgaactacaattaggtaacaagtgagttagcaaagatacagatcataacccaatattcgaattacaagcttttggtgatcaattctgttggtgcaggaattagcacctccgacaataccaatttaaaccaaggaataacgtgaataaaatcgagaattcgattgaaccggggaatcccggctagcccgttaatgggcctaagtcatgagctcgtcagaagatttgggtcgacaatcgagatcgccataggcggcttctcaggtcgtgtaaagggaaaacttccatttaaggaggatctcatgaagaatggaagtaatgaagatttagacctaggataattagaagtttatcatattttgatacgttcaacccattgtataaatagggggggtcaaagtccccaaggatcatctttaaccgaatacaagagactacaattatagagcaaaccccagctttttattcaagcaactttgttctctccctttgattatttgtgagctaagagaggagtgaatttgtctaaatcccttagtacaaattcattgtttgattacagaatcaacaattggcgcgccaggtaggggggaatataaacaaattttctctaccctcctttaatcaaagcaagcatggttcaaatcgtcatcgaccccatcattcctccagtcaacgatgatgggacggaatcaagtctcctccacggaggagatccaccatctaccgtcgaagtagcggccaaaacgaccgtgaatcaaccaacacacggggagacccctatcgactcaccatctttctcattggaggacatcaaagccatcctcacaaccgtgacgaaagatctctctgaatcagtcatggagactaatcgccgactcgacgagctgccaaaaggaaggcggctggggtcagaccgcgccaaagccgtccaagacgaggtcgagcggctcctaaaagccggcctgattaaagaagtacaatatccagaatggctggccaacccagtcgtggtcaaaaagaagaatggtaagtggagagtctgcgtggattacaccgacctaaacagggcttgccctaaagacagttatccactgccacacatagatcgcctagtcgaggcaacgtctggaaatcagcttttatctttcatggatgccttctcggggtacaatcaacgaaaaacctatcttctataccagtaaagccctgaatgacgccgagaccagatatccgaccttagaaaagctggcgttggcggtgataacggcagctcggaaactccgaccttatttccaatcacattccatagtgttcactgatcagccactacgcacagtgctccacagcccaaaccagtctagacgaattgcgaaatgggcaatcgaactgagtgaatacgacgtggaatatcgctctcgcccgagcctcaaatctcaggtcctagcggacttcatgactgaactatccccggatgtgattgacgttatcccggacgaaaactggatactctactcggacggctcctcatcattacaaggctccagcctcggaattctacttcagtcaccaaccagagaaatccttgaacagtcacttcggctccagtttaaggcatcgaataacgaagcagaatacgaagcacttctcgcaggacttcgactcgctaaggggctcggagccaaacagatcaaagctttcagtgactctcaactcgtagtcagtcggttcagcggggaattcgaagctaagaacgaaagaatgcgggctcatctttcaatggtccacgtccaaggacttcccagaatggcattgtagattggttccgatcttcagaaagagatcagcgatcttcagatcgcattggttgctgtaaaagagcacgggaagagggagtgcaacaggttgcggaatgaccgagctgctaaagtcgcccgtactacaaagaaagcccaagctcgtcttgatagagtgaaggcttatctcaaggagcaagaggacctcgtcgggccaaaggtggatgctgagaatcaagccagaggcgctgaggagatagtgggcatccttatgcagagaggtgcgaagattgcggcatctgaactcagcggccttaaggagttaaccaaaagggcgaccgacgaagttaatgccttgaacgttatcgagctcggggacgatgatctgaacatgtccccagatcagctcggtttttcgaggcaaacctcccaagttgctccagtggcggaccagcacggctcaaatgtcgacctcgttagcggaagtgatattcgacgtgtaagcgttgaagaaacgaaccagacgacctgaataggtcgtctttgtaatctattttgaaatattgatcgtggacccaattttcggggcgatctcaaaactcttatttaaccgtgaacccactttcggggcggtttttaatttttacttctacgtcagggtcgacctcgcgtcgtatgagcgtccgttctcggggaggaaaaggatgtggacggagtttcctggtagattttttttaaatagatagggtaaagatatgtcgatcccgattagattctcatagctttttcttttgttgcagatcgatacaggcctagtccggattttcccgtcgagttcgaaggagttttagaggcgatcttccgagctcgtcgtcgtacctggaaagacgtcacgaggtcgcgcgtcaacaggataatggggaaggtcaggaaatccttcattagcttttaaacatgccacctcccccagctcccatcgaagaggaaagacagcctttagacggagaggcggctgcgtcaaatcctcccgttagtgctggcccttccggtggcgaactggtttgaagtttggatccttattgagcttatgacaggttacctccggggcgattcctgtcatatccttcgtagaccaagcaaaagatgacgacctcgatttcaggaaggcgatcagctcttcctttatctctccttctagctcgcttccgataccgaccgtccgagatggatccgactcgtcgatgttgacctggataattgttataggaaaactgaagtcaagctatagcgttcaggggttaatctggcgagctggaaatatgaagtcagggatgtttagcaaagcacgtgttgtgagctggcgagctggatatgtgaagtcagggatgttaagcaaagcacgtgttgtgagctggcgagctggcaatgcaaatggacgttaacggcgatcgttattaacgtggttaacgtttactttctttacctttttgtataagagcaacatgttatgctcatgctttcattatcgaataatctggttgtaatctctctctagagacttctagatttccctcatcgttttaccggagctctcgtcgagtctcttgtaggtgagaagttgatatcgcgtctctttacgaacgttgtatcaagtgtgttaatcggagtactctattttcatctctctgttctattgatttcaaactctgtttattcatttctggtttacgttaacactggtatcagagccaagcgtttcctcggaatcaatggcagaaactcgttcgcagatgttttatcgggaggtttcagctattcacgaaactatgtatccgtcattgaaagtggtttgtggtcacaaatctgatgtgcgttccggcaaagcggcgacgacgaatcagcaatttggtgttcaatcctcaccgtgcatcggagaatcaatgttggatacgagagcttacaacattggaagatcctcacagctgatatctacagctccgatcgtcactcctgacaccagcaaagagagagtcggtatgtcgaacaaatattttccattggaagagagatctgattttgcgagacttgagcatctcagatttaatggtgatagaattacagaatggttgttccagattgaacaatttttcttaattgatcgtactccggaggaattgaaagttggcttcgcttcactccatttcgatgacactgctgcgactttgcaccaatcaattgtacaatcgatgtggtggaagcatgttaggcatgattggtggagttacaaactgttgttgcaagtgagatatgatgagcatgttaatgactcgattgcaaaactgacacagttgcaggagactgaaggaatagaggagtatcatgctcgatttgagttgattagcactagattgaacttcgctgaagattacttggttagtgtttacttggcaggtttgagaactgatactcaactgaatgttaggatgtttggacctcagacaattcaacaatgtttaatgttgggaagattatatgagatggctcacccaaagagtgtgcttatcagaaaaaagagtgatgattatcagaaagaagctcaacatgtttcaagtaatgctgcaggaacttctatgattaatgatggtaattgcatgataggtaatgatggagatcgattccttagtggttcagacttggtagagaatgcggttgcgacggtgaagaaatatttggttgaaattgatgatgctatgtctagtgatgatgatcaaaattcggatgctggggacgtctttggattcaacatagaagagtgtgaaacagattcatggattgaacataagccgttgattcaagatcaagccgcgtttcactccatagacatagaaggtgtctcacaacttcagaaggttcgttcaaaccttaaggattttgataaagttgatgcaacaatgaatcaaatgctgtcatcaattggatttgttgttgatgaattacactctagttgtggaagtgctaccgtccatgtccagaagaagcctagtaagtctctcaaatcctggaagttcaaatttaaaaccagctcacaagaccaaggggatcatgaatcacttccaatagggttacatatcagattcaagtcctggaaatttaagttcgtgaatagaaatttacaaatgatgagagaacatggatatacaacacactttcagctaatgtctgataagagagaacatcaagagatgttcattgtggccaggattgttgatgtgagatgtttgcttagcatgatacttgggataacagagagtgatgcaggtcatggagaacaatttgtgtatgaccggattacaatggtaaagaggctgctgttgcaaaccagtttagtcattcaagaagtgatgagaaacaaaaagatcaagtttaccaaacggtggtggttcaagtataaatttggggaagagggtttcacgagactgaattctttcaatttgcgtatgacttatcattttgcggtttggcattgttggaagagcaagaccatggtgcatgttgaaatgagtggtgatcactggtcttggatggtcttagtcatgaaatctacaacatctagctttttgtcacttctctatgatcgaagaatgggagatccaagcagacatgaaacgggtcgggagattgtgtcacttcagggtcaaattcacactggttctcctatgattcagtgcataaagatgagcttcagcattctccttcttcagggtctgtttcagagtttgacaatgaagatgctcacatatatgcacttgtttggtagcaaaagttgtgtttcaactttgggagtgaggaaattaggcaaagattggtggtttaaatacaagacagatgcaagggctacagatttactgacaaatccgtagaaagagtaactacgaattagacaacagaggatgatgaagttgtcacaagcttggcgattcaaggtttaggacttggtaaaaggaaagctatgattcatgttgatttatgtggaagaggctacatggagttactctataaactggcaaatatgtttccatgaaccttgaggtcaaggttctctgaagaggggagatttgttataggaaaactgaagtcaagctatagcgttcaggggtcaagctggcgagctggaaatgtgaagtcagggatgttaagcaaagcacgtgttgtgagctggcgatctggaaatgtgaagtcagggatgttaagcaaagcacgtgttgtgagctggcgagctggcaatgcaaatggacgttaacggcgatcgttattaacgtggttaacgtttactttctttacctttttgtataagagcaacatgttatgctcatgctttcattatcgaataatctggttgtaatctctctctagagacttctagatttccctcatcgttttaccggagctctcgtcgagtctcttgtaggtgagaagttgatatcgcgtctctttacgaacgttgtatcaagtgtgttaatcggagtactctattttcatctctctgttctattgatttcaaactctgtttattcatttctggtttacgttaacaataatcctgcaacttggcgccttcattgattcgcgagctggtcgctccgacggcgcagctcgctcttcgtcctttaattgctatatccttctttcgctgcttcttctcgatcacgtaacatgtccgtgagacctaagatggtgagagaagcagagttgcatgctcagaaagacaaagaaaagaattgatcgacaccaagaacacagctgacacaacaatttacagcatagagaagagtcttggtgaatacagagagaagatcccaagtgaaatcgccaaggagattgaagatgctgtggcagatctaaggagcgcttcctctggggatgatctcaacgagatcaaggccaagattgaggcggcaaacaaagctgtttctaagattggggagcacatgtctggtggttctggtggaggctctgcaccaggaggaggatctgagggaggcagtgatcaagctccagaggcagagtacgaggaagtgaaaaagtgaggagatttggtaaattcttgccacttgggttttaagagatgaggtttagatcatggtgggttctatgtccaaggaacttttgccttttagaacaacgagcagtggatatgtttctggaataagcttttgtcagggaactaaacttaatgtttctctgctaaaaaacctttgttatgtaatgtgatggttaaagagaagaagttttcaaaattttgtcactttatactttatagtttattttcattggattggatattatctttctttaagcttataagttttcaaagaagcggtcacaaaactagcccgagaagaagctaccacaaaactagcgatgtaagaaccaacgacgacacagctggctagctcattgtttggttcttattctttggaacccaccaccacgccaaaacttatacggaacaactacaaccactacagtggttccgaagtttttatcacttgacttgtttgtagcactcaccggagagacccgctaaaggagccagaggtttcaataatctcattgtgaaacgtgcggataactttcgttggggaatttgtaatttacgcaattaccctctaatttattttaatttttatgaaataattagggctgatttaatcgagatcccatttcttttgttggcttacttctctcgaatttacgcaggaagatcattagcagagaattctcatctgattcagtccatggctgccacggctcttttccgatcgattcgtcgacgcgacgtcgtctccgcgcctctttccgtttacaaatccgtatgtttttcactctcgttgattgcgtctttttggtggtattattgatagatcgagaaattttttgtgattcgtttagtttcgtctttcgacttcatgatttacccatctgagctctgcttcgcttcgccggaaattttcaggaaatgatatatatatatatccatttgcggattttggtgtgttatgtgtttaatcgtttcatttaaacaaaaatttgagatgagattgttgtgtaagtagacacatatctgtcgaaattaaccttaagaatttgtttccttttgattgattgagaaagcttgtagttgagtatagtgctaaaaggttgggatgaagaagagagtttagcttcatatcactgttgtagtttgagtgcctaacaatcattagaggttatggtcgttttgtttattgcatatgcgtagagaaattgttggttttgactgctcttgaaacgttcttgttttgcagcttgctggtaatgctcaaccttcctggggtagttcatacattggtcagaactatgcaagtttctccagagctttcgggtaggtttgtgtttgtttcttgtgctttttatacctattagaattactctgtggatgtcatttcgactacgtgttgttttcttttataggtcaaaacctgttgtgaatgacattcttggtactggtttgggcactaacaatgccattagagaggagagagaggtaaaatgactttgtctacattttgtttgatttttgcttttgtaatgtttaagagcagcttaacttatcctttttgcctggtgatccttgtctcgatttttccagaagtcaaaatctactgaagctgcaattgttggtgctcaattgactcgatctttccgtgctcttgatgtgggaacatcgaaacgattgttttctacaatctcaggggatataaagacaacacaggaggaaccaaaaatcaaaagctttcgccctttatctcctcacctttctgtttaccagcctcagatgaactccatgctatcgattttcaacagaatctcaggggtttacttgaccggtgtcactttcgctggctaccttctctacctgaagatgggtatgatctgcctcacctacccgagtttctaccaagtcctttaccatacacaacagcaacttccagtcatcacctcggttactgcattagccgctatttatcatactatcaagagtactcactcactcttgacccattaaaaacctttaccaaagctctttcgatgaagccgccaaagtctccagtaagagtttctttgagatgattaataaggagacaagaaaacatttgttaaactctgtcttgaaaaggtaaagatttagcacctgtttctttggattcgaggcttttttgggggtatgtttgttgcttttctttgttctcagaccttttttgaatgatgtaataaatgtttaccaaagttctgttgctacgttactctttttgctacaagttttcttcatgaaatttgtcaacttcaatttcaggaaaagatgagttaaaatattgttttatttgcagtgatgatgttttaatttttaatgcaatttctatcaataactttaatcaggctaatttttgcgtttgttaaaaaaattaaaaaatttaaaactctatgcgagtcctccaaatcgaaaatgacttgggaccggagctcttatctctataactcctgcgattcctattccaactacgaacacagaatctcctcttctctatataagtaacacttttgcaatcacaatctcttcgattctccttgtacacttttgcgatctggcatgggccactagttgcagaccagctctctcccaatcctccgaacgaatctccaatgccctaatcgtttgttcgacctcatccagacgagtgacgacccttctccttttcttcttcagcttagcaatcagagtttcgagctcttcgagacgaaagtccactccgtttcttggttcgaaagtactgcagctcgcggcattgatcctgatgcagaaatccgacctgagaaatcaaagcaacgaagttcttaaaaaaaaaaaaacatcccgatatcgaaaacacaaaccaaagcaatccttacttggttaacgaagttctgacactccgtggtatcagcatcagtagcagccggcccaaggtagaatagagaaggcgtcctgggaatgaagttcccatcagcaatgattgttggattcttctcctttgagacggcagcagcatctcgatcacagtcctcacaatacgacaaaagaacgtccggcatcggagccagaagctgaaaaccattcttaagccaatggcgaggatgagactccagcatagccatttttcgagcgatgtcagatcttcgttcatcatagtacctcagcatctcgcggtattccttatgcctagactcgacacatgacaagaaaccctcggcttcacgtctttcctccgagctcgcctggaataggagagtccagggaactcgaaggttattgaagaacggcatccctcgttcaatcgcctcagcattcgagaaagtcggaacatttttgccaacgaagggagaagatccagcactctccaacgaaagggccgatgaaacaatagtcgatcaacagagtatttataggggcaaatacagaaatcgaattgggaatttgcctaaatgcgatctggaaattctcattttccttttccgagacattaatatttccattttctccaaaactgggaaaatgggaatttacttaattacgggttgacttccccctatttccttttccaaaaaatgacaaagctcataaatggaaaaaagaactattctgcttcggaaacaggcaagatagaaaatcatcgaaaatagaagttaaaattaaaaaccgccccgaaagtgggtccacggttaaataagagttttgagatcgccccgaaaattgggtccacgatcaatatttcaaaatagattacaaagacgacctattcaggtcgtctggttcgtttcttcaacgcttacacgtcgaatcacttccgctaacaggtcgacatttgagccgtgctggtccgccactggagcaacttgggagatttgcctcgaaaaaccgagctgatctggggacatgttaagatcatcgtccccgagctcgataacgttcaaggcattaacttcgtcggtcgcccttttggttaactccttaaggccgctgagttcagatgccgcaatcttcgcacctctctgcataaggatgcccactatctcctcagcgcctctggcttgattctcagcatccacctttggcccgacgaggtcctcttgctccttgagataagccttcactctatcaagacgagcttgggctttctttgtagtacgggcgactttagcagctcggtcattccgcaacctgttgcactccctctccccgtgctcttttacagcaaccaatgcaacctgaagatcgctgaactctttctgaagatcagcttctcgactattgagcctcttgacctcgtcgttcaacgagctcatctccgctttatgaatctcggcagcatctctcaatgaagccatttccttcatgtctttggcatagatggctttggcctggtctgcgcacttcttcagattatcgaaggcctctctgtcggcgagcttcagcttcaacttgcgatcgtatgtcgcgatcagatcgttagccagggcggcggtctggaaaaagagccatgtttaaagccaaaatactaggatactaagccacaggaagacatgtaactagcgcgtacctcaagtgatgatctggcaaacttctgatatccctcttttagaaccagatcgtcaggattagggaaatccttcgtcccagggagcatcaagttgcgccaaagatggctggcggcctcttgatctctcacgaggaatttctcaccagaatacttgaacgtaaactggtcagaattaagagtctcgcctcgcgacaggcgaaacgtctttggagcagcggcctcatctaaaccggcttcagaagccgacctcttcttggattggttagcccctcctttccctttctcctcacgggacctcctggaaatcccgggctcagcaacggtttcgtccttgtcttgatcaaggatagttaggcccgtgttgacctcttcgcctgctggaggggcggcataaacgacgacggagcggtcgtcggtaatattttgaacttcaggctcgacgacctgaacggactgacttcgatcgcactcggcgatctcttgagctggcacgacgtcggccccttcaagacacatcctgtcttgagactccgggttgaccatctcatgggagacctgatcaacaccggaagggccggcactaacgggaggatttgacgcagccgcctctccgtctaaaggctgtctttcctcttcgatgggagctgggggaggtggcatgtttaaaagcccagcagcgaagctaatgaaggatttcctgaccttccccattatcctgttgacgcgcgacctcgtgacgtctttccaggtacgacgacgagctcggaagatcgcctctaaaactccttcgaactcgacgggaaaatccggactaggcctgtatcgatctgcaacaaaagaaaaagctatgagaatctaatcgggatcgacatatctttaccctatctatttaaaagaaatctaccaggaaactccgtccacatccttttcctccccgagaacggacgctcatacgactcgaggtcgaccctgacgtagaagtaatattcttcccagttcttgaagttactgactttaggaccgggaagaaagttatgctttgggcggttgttcaccacccaatagccgggcgacctgatagctttcaacgtcgtcatttcctcaaaacaacgaacatttaccaggtaaccttcttcagcgccgaaggtcagagcggcaacaaaattgcagatcgccgccggtgtaagctgggagaacgccatatgacggcgattcagaaaggagatgatcagagacggaattggaaaccagaggtgacattgtctgaagtaggcttcatacatacagacgtaccctcgagggggattccatggacgctcattttctccgggaatcatgcaagtgagcgggcgatctccggagccacacaaggcaaatacttccgcgactgactcggttgttgaaagggtctttttcgcggtgatctcggtgttccagctaaccactgggacgaggtcaaattcaacatgatcctcatgaagtaatctcgcattaacttcagcctctgtatactgcggctgcgtgttataagcatcctccaggtcgatgagtgggtcgaactgagctaagaaatccaccggatcttcaggagcagcgagatgtccaccggaaccctcccgatctggctcatcaagcaacgtcggaatctcgatccggttagatcgactagactgagcttcgttacttggattcccggttaaccgagagtttcggcgaactaatgatacttcgctctcagaggaagaagaggacggagagacaagaacaaccttacccattgccggaaaaatcgataaagaatcgagagtacaaaataattcgcagaggagagagcgagagctaccttagattcttcttgcaagcggcggaaaatgatttcccgagggtttaatctaatataaatagaggcgattgggcgacaaacctacgaggtcatcattaaacctacgagacgcttcggttcctgagcttcacgcgcgcgtacagacgcggcgatttgacacgtgtcagatacgttcgaaatacgaatcgattcggaaatgatcactttgtactgaacctcgctttactgtcatctggcccattgataacgacaaggccatcctcggggatgttgggatcccattattgcacagacaacaggtgacaacaagagcacatagaactcgaattcgaactacaattaggtaacaagtgagttagcaaagatacagatcataaccgaatattcgaattacaagcttttggtgatcaattcttttcaacttttagcggttaaccaaaatcttttatttgcgacataggtactacgcgaaagatttataaaaataggagtgtcatgaaacatgacacaactagctccaccagattcttgaagaagttggttgtaggccctcattgctaccatcagatgtttctttcaccataaaaatattttgtaaaaatcagatatttattagtgactattataagatataagacaaaatgaataatcatgattttctaattacctgatgttgtaataatcatatgtcgtccgacgttgagcaaatgcctcaaagctactgtttctttgaccacatcgttgagcaaatatctcaggaaggatccttctgataacagccaatttctctggttttggggtggttgaagaagactcctccgttggagatttctcctttgatttatttgacttctctgccactttttttgtctctctttaccatcatcaactccagaaattcaactaggcaataacatacacatgctccgattcatagatattcacagaaataaaccaaatcaacaaagagagagacaaaaaacattcttttacgtacctagtggttcagaacttggaggggccgacttcggttcagaacttggaggggccgacttcggttcagaacttggaggggtcaacttctcttcttccatgaagaaatgtccaaatcaacaaccattttataacatacacatgctccgattcataatatacacagaaataaaccaaatcaacatctattttttacgtacctagttcttccatggtgacttttggctttgactcagaacttctggtcttaggctgaacgaagacatgtccaatctgagcagaaaagagacagaaaccaacagcccacgcaaatatgcttcctgccaagcctgaaattcttaaggaagcactgttcagtgtgaagtgtttctttctgtatatcgatgcaggcttcttcaacaatttactacaaatttttgcattgaaattttgcactttaacggttgacgacagtattgcatcacccaaaattggttttcttcgtgtacaagcttccataactttgtagaatagttgcgaggaaacagcagcaaaccacttccggattccctcctgaggagaatccggaacagatatatgacgctcgagtctttgtaaacgggctttaagccttcgaatgtcatattcatgagactgcagaataggattttgcacctgaaccaatgacaagaaaaatgtttagttttgtttcagcatataaccaaatagaaaaattatggtttgtctgtttgttcacttacaattgaggcaggtcttccttttgtatccttcacctttgctagctgatgttcaacctgatcctgtttgacatcttgaagtatttcacagataggtgtaattagaagaagcttttctgtattcaatgaatcgaattttgctttaatatttgtctaataatttaccttcattaacctctccatggtcagcgtctttgttctctgttaagatgagtttactcggcttagtgaaaaccttacaaggctggtcatcatggagagaatcaggtcctttactcctctcatcatcttgcatgttatcattttcatcctcacaaggatcataaggatcaagcacgctcttgacctgcatagatcatccacaatggatggacatcataaagacgagagaaacatgtctgtataaagagtagcagcctattcttccaatcagattacctttacagttaacacgtgatgttggctgttaacattaccaatttccattctcagaggaatctttggccatacatactgagcttcttcttcttctgaacagcctctgaagaaaggtggctggtaatctggtggctgcaaaaaggttcaaataagagctgtcagcctttcttatgggcaatcaattttcagagtagaggaaagtgagataagattattcgaaaagaaagcaaagcataccacatattcgtagtaaagaagcttcatcaaaatggtgcgctggacagaagcaaaaaagtaacaaagtctgtaattggcaatatggaaactgatgtaaactgaaaacctctgataggtaacaaatgcattacttcttcgggcattctgtccaaagtcttcatcaactgaactagggtatgaaccattttgcaagctgaactcgtgttgtcactacaatcatgaaataattttaagcaggttatgcaagataaaacaatctagacctcacaataggataaaaaatttcacctcatttgatttagggtcatgtcagcagtggagttgtcagcagtggagttaagagttcccccataggtattgattccagtaatattgatattcatccggacatcttgactgtcagaatctgaatagctgaaagaaactgcagtaacatagtgagagtatcaattaatcggaccattttaccagcgaactacactagtattgaactaaccaatcatctcccaagaacttacatatgtattcctcaatcaagggaccatctactgtttcacatatgtagaatatcagctttttcaggtgtttcttatgcagggcatcgtagacccctttctccatccagccaatcaatcggcgtgattcagcgtccataggcattagcttcttcatcttcagatctatattgtgattcaaaagcgtcaggttcccattaaacagttgtagaaacttccatggttagtgtctcacctaaagcaggaaccgacatatccttgaaataccgcacgggaaagaggcctctgatgtaactgatattgaagatggcagtacggagcaattccgtagtctatttcaacacaacgaagaacaaaacaaacaagtcagagccaaaaatatatgtatcggcgtgattgagaatcgaaagacgaaaatccatctctagacgcaggacgctacacacgcaaactaaatccagctgcgaaaatcaccagcaaggaacgagaaattggagctagaagaggtgacttaccaaaatgagcgattgctgctcgttgttcttgcttaccaccaccatctttggctgagaaatttcgccggaaaaaccctagaatcgcatagacgtatctctctctctttcgtacggaaaaagactcagaagcgggagcgagtttgaaaatttataaaaaagttactcaaaaaaatagagaaggaaatttaggggcaaggttggtatttggcgatgctagtaggggtgatcctatcagttacactctaacggcctactatctgtgtatacatgctgttgtaggcataagtcccagggtacgtcgcaaacctttttctatcaacgacacctaaacgagagattacccttggcaagaaccttgtggtggcagccactctcggctgaattttatctacgtaataaacaaatacaaatcattaaaaatcacttagttttgagatcacttagaccacctccaatgtaataaaaataaatgaaaacaagatattaggctaaggattgatcctaagcttagagttttaacatttgttaaagactttagttgtgttgctttgtgactggctgagaaaaaactatataaaaaaaggattatgcattgttttaataatgcttaaatctagtcgttatttaagttttttgatttgtatattttctttttgcttttatatcatgatgtatgtatacaattttaatatttgtagtaattattaagtatcaaaacccgacttttgtacttagcatgaacgattgaaatatgatttgattgagtatcagagtatatatatggcaaaattttggtccgaatcaagcttaaatattatcctttttcaaattttcatttctatatatttttttgcttttatgtcatgatgcatgtttacaattttattatttctaataattattaagttttgtcaaataaaaaactttataatattttattttaaaatctttattttttttgaagaaatcctcttaaagtctccaccaccattggacaataaaaaattgtaaagattcaataaaaactctaaactttaaattatttaatatttattattataaaatgcaaagagttcttgattaagactctccaatagacttgctcacagtgacaagtaaacatatttaaccgccagtaattctacatatccacaaaagaatcatacagattaggcttataaagttaatcaaagctttataaaattacaccttccatgcatgtagatgtaccagcaacgattcctgcgttctccaggagtttctctgtcaaggaccagagcctgacaacttctgtttttacctcaccaagacactcattacttccttctgaataccctctctctggcattacagtgtgagttgtgtcggcctcaatgctcatgtcagcttgagttaacagttccgtgctcatttttgcaagcttctgtaatgcactggtcgcagcttcaacttcaaggttagctgcctcaagctgaagcatctctatggccagatcacccattgttttttccccgactctctcttgtgccaaggcatatagcactttcaaatcttcactgtcattgatcgtttcttctttcaatttcttgagttcctgctccttggcttctaatcttcccatgaccacgttgatctcttcgtctttaaatgtcaaagccctctgcaccgctagaacttccatttctttcatccgtagattttctctggtgaagcttaactccatcaccagccgtttgttctccattccgtaatcatcatgaggtttctctagtggttgctgcattgagtcaatgcttatctcattgttaatcctcattgcattctgattttgaccgttggtggttgacataagcagtctgttcgtcaattctgcaattctttccaccaccatttcagcttcagtgactttcagcttggaactgcccaactcaccttctattctgtgaaggtggacatctttctccttcagcatctcagttgcctccataagctgatcttctctactgatcataagtgcctttagctctgttacctcctggttcacttctcccaatttatttcgagcttcagcgagttcttcatccttttcttgcagtaatagttctagagaagcctgttcggacttcagatgctgaatctctagtttggcctccaccaaacttgactctttctcctgaagtagattttgtgatacctgaaacgcattagcttttttgtaaagctcatcttgaataacggatatatcatgcatagctagctccaacaatggtttctctttctgcaactcctctcgtaaatcctccagcaattctttttggaccgatatttcccgctcaagcgcaaaatttttagcctcaacaactctgagctttactctctcactttcaacttcagtgtgcgcatccctcaagctttgcatatatgacaacacacttttcctctgttcctcgagttcctccaattgtttttccaatagtagctctttttcttccatttgctccctggaaaataccaaagcttcccgagaagaaataagctcgaatcttacatcagtcagaagctttttcactttcatgaagtcctccatggtttcattggcttctcctaaacgtttcacggtttcctctttaagcttattcacttcatcctgggctatcagccactcttctgtctgtttcttcaagttggcttctgtttctctaagcttttcttgttcaagtttcttcgtagccttagaaatctctaattcttcttccttctcctcaagagctctctgaagtgcatatatttcaccttcttgtctcttgacaacttcgttggctttgcttaagagttgtgacttgctttcaaattcagaaatagccatagaaacctccttgcttctgtttgcaatctcttgacgcatcttctctagctcttcctctttcaaagtcaaggacgattgcaaagcagcacgttcctcgtctctttcccttagcttatgctttaactcttctatctccctggcttgagaagctaactccacatttgcccgcttcagctcctcttgtagactctcatgcttcaacgaagcttcagagattgttttctcacgtttttctaactcctcctttgcccggttaagtttatttttgtcagagagaagcttcctctcagcatcgtgcaggtcctcttcccttttcaacaaggccactagcgcagcctcaaggtcagactcaagcacgccaaggtttgaataggggagatcatcatcgtcaggataaaccgagtgttgattggtttgtctctccaatctgtgtgtccgagcaaataatttatcgaaaagaacatttgcagactcagctgagccattgtcgttgatgttgggtcttgtattgtgcaagactgattgaacactcagtaaaagatgtctctttctccttgtaatgctcgggaatgcgacaagactcttctgcttatggtttactactcttgtcaaacaatactgcataagaaaaaatcatatggccgacatcaaaatcaaaatcaaaagtttgattattttggacagacactaatcaatatggatgcaagcaaacttattcaaattaaaggaacagtattgaaatttgcaatctttttaagccagaacaaggaacaatcagaacaaggccagcaaaagtcaaaaattcaagtttgataaagttaagagtaagtaaagtgttgtgaatcagcagcgatatataaatgaaaatataggggataatatagagaaaggtaaggaaacaaacatcgcagggagagggagaggagaaggaagcaagattcaagcgaatggcctgagagaaacccatcctgagagcataattatgcaatcgccatggagcttaaagacggaacaaaacccaaatccactggatcaaatttaacaagtgggcgttttggagaagaatgcttacgagaacaaatccaaggaagaagaagaagaatctagctagggaatggatattgttacaaaattcttttaccaaaaaaaaggatacaaaataataaatagaggctcgcgttggcttgcgagttgtggtcgccagtaaactcgaaagtcctttttgcccttattcataagatgcatgtcggcattgtccaaatacacggccaagggatctatttgtaaaaataatggactcttcttaattacgtacgtggtaacggttttctagtatgacaattctctttctttcgcgtagtcggctagtcgcgtggttagaaatgcttacacactaaagagtatgttatattaaactggaatataaatttaagaaactgaataaaagtcatcaggcccatgacattggcccaatagacccaatgaaaaaccaatccatcagctagttttcttaacatatcaacccaacgaggttgtatcttgttacatttgcaagtgaacttttttatcattaaaaaatgtaacaatggtatttttggtttagtgttcctaaaatatttgtttcccacataagattttatctacaccaaatagtccaattgtataatataatccatcttcacaaaagcattttaaaggatatcctaccttctaaattccggcgaaaaatatcttaaatctgaaaaagtgatttatcgtgaatagtgtaatgttagcaaaatcttaaacttcaaaaaatcgtaaaacataaagaattaagtgtgacggattaattaagatatcgaaaccaacacagtaatcctcatctatgacttggaaaaactcataagtggcaagtggagttcgagtttggtcattattgtgaaacaccaaacctaatccacttacaaattcattaaaaactacaaatttgtgtggtagtttttttttttttttgggaaatttatgtggtagttaattagttaacaaacaattatatataaatacaaattttgtttggagttaggtccgcttcagcctgcttaagcgattctaagcttagtcgtataatcgtattagcaaaagctcgaacagtttacttctttaccctggaaagtcttatcatcatcagttcgtgtcgtttgactttttaaactttgcaaggaagggttttgtggtggtttgggagaattaggcaattgttggtgatccgatttttctgggtttggttgggttccttttttattttttaataaaaaaaaaaaatggcgggtcaagaggatgagtatgatccaattcttgacaataaaagagaagctgaagcaaaatctcaggtttctgttgctgctgataaaaatatggctccttctacttctggtactccgatccacagatcaggctctagacctcagcttgatctaagcaaagccgaaattcaggggaacctcgaggagagagatcccaccattttattgcctaatcagtctgatgatatctctcatttggctcttgatatcggaggtgacaacaaatttcacttcttttttattttcactgtagttgaccattgatctagtgcttgtggttcttccagtagtatttggtgtcacttcttggttttggcaatttcgatgtttatttcttaagtgctatgtttgagaattatgaacccttttaagtttatttgcaggttctttgataaagttgttgtatttttcacgacatgaggactactctaatgatgatgataagcggaagaggacgatcaaggagagattgggtattaccaatggcaacttgagaagttatcctgttcttggtggtagacttcattttgtcaagtttgagactcacaaaattaatgagtgcttggattttattcattccaagcagcttcatcgccgaggtattattacttttatccttttcagtgtatgaaatgttgttttgtattataagatcaatttctggtgatttactcttcaattcgtcttcttctccatttcttttcaactaaatgaatagatccttatccttggagttcaaagaccttgcctttggggactggtgttatcaaggtaatcgcatttttatgacttgattgtttttatctttatcaccttttgaggctccttctgcatatatttagctcgctctttcatttgagataccagataacatttaagaccctcataattattgtttttaggtgaaacgttttttatatttataagtcttgtatatccatgtaatgtgatttgctgattcggctttgattagttgattattacttgttttaaacatatgagtcaagcgtacgtgtatctttcaggtcacaggtggcggggcatttaaatttgcagacttgttcaaggaacggctgggcgttagtattgagaaagaagatgaaatgcattgtcttgtttctggagcaaattttttgctcaaggtaagacctttctttatgcaacattccatttatgttgtctctgcatacatatttgtaccttttattactagcacttgcgaaatagaaacgtaaagacagactctcattatatgtgaccggttgatttgtttgttgaagttctgagtcacatgagagaaaaacagctggatatctgtatgtgtgttttactatacttaaagttctgctaagactattgaaattttgcaattagtctacttttcttttgtctatttgcatgtgtatgttttgaatttattcttagtttcttgcattttctgcaggctattcgacatgaagcctttacgcacatggagggtgagaaagaatttgtacagatagatcccaatgacttgtatccttatcttcttgtgaacgttggatctggtgttagcataatcaaggtatttgtttacgtttgctacttttttcacaatcagtgtgtgtttggctccttgaacttctgaattgggaggtcagaagattgcatggacctgtagatttcatgcaatggcttttcaaagtataggttgatggtgaaggaaagtttgaacgtgtgagtggaactaatgttggcggtggtacctattggggcttaggaagacttctaacgaagtgcaagaggttacagagctctgattttacattatttctttatatttttgtttcctataccttacactgttttcttttgtttcagttttgatgaattgctagaactcagccaaaagggagataatagtgccattgacatgctcgttggtgatatttatggtggcatggattactccaaggtaggagtcaactttgcatcaaactacatgtgatctcatttgttataggatgtgactactctcctattgaaactcagaatgctttattactactgttctagtaattctcattaatcaatcatacagattggtctctctgcttcaacaatagcttctagttttggcaaggcgatatctgaaaataaggaactggacgattacagacctgaagatatttccttgtctctgttgcggatgatttcatacaatattgggcaggtatgcattggcgagtccaaaggattcaacgaagttcttaagcaagaataagcctaaatgtttctcatttttattcctaagcatgattccatttggaagttttgatcagtgaatgtgataagttattgagaatattatgagtttctgatttgttttgttgctgtgtagatatcgtacttgaatgcccttcgctttgggttgaagcgaatattttttggaggatttttcataaggggtcatgcatataccatggatacaatttcatttgctgtacatttctggtaacttcacttgtaaacttgacctagatgtgatatgcgtactcaccttcttcactcaaacttatttatttattgcttgactacactaggtctaagggagagatgcaagctatgttcttgagacatgaaggttttctgggtgctctaggtgcgttcatgagctatgagaagcacggattggatgatttaatgtcccatcagttggttgagaggttcccaatgggtgcaccatatactggaggaaatattcacggaccaccactcggtgatttggacgagaaggtacgaaatttagcttacgctttaccaaagtctcagtttgttctatttaatactttgaaactgacagccaaaaaaattccgtaatgacatgggacttctcaaaatatgaaagtgcgggaatatgataccatttatgccttgtgctgggtaaagtgtatgctggttaccattatagtattctttaggcagttgcattgtagaatatgcttttcttgaaattggaatcttttggcaaatgtttgatcttccatggacttactgaatattatggccgaaggagatggtcggatactttgagactgttgaagtgcactatgacttgttcctttccatggtttgtgtgctgactgaatttttttggatactcaatcattaatcttgatgattagtcatagtttatgcttgtatggatatttttcgctgtgaagtttactggttctttcctttttatatacaaagtatcattttgtgtgacaaacgaataatagaaagcaagagtaagaaaaacctcgttttcaaatctgtcacagttatattctcttttcttttatgtatatatcaaaaacgagatggaatcaagtgcttttttcccactttccttgtgctaatggtagagagatatcacatcaactagttataagtgttgtgtgtcttgactctgttctagataagttttggagtttaaaaaggctttcctggttgctttcagatttcgtggatggagaagtttgtgcgtagaggaactgaaataactgctcctgtaccaatgactccatcaaaaacgactgggcttggagggtttgaagttccatcatccagaggtagtgctttaagatctgacgccagtgctttaaatgttggtgttctccatcttgtgcccacattggaggtgttcccattactagctgatccgaaaacgtaagtggcatgtccctgagtaatgtattgagcttgtacatatatgtcctggtttgctgcttgttcatgattttggagattttatgttcgtgtgtttaatcgatttgttttaccccaggtatgagcctaacacgattgatctatcagatcaaggcgaacgagagtgagttataagtcgatgctgatcttccaaacactggttttatttgatgaagtcactttttcttatattgtttattttctggtggggtataggtactggctcaaagttttgtccgagcatttgccagacctcgttgatacggtaactgttaaagttaacacataggatttcttttccatcttcagtaatgttactttttgggtggtgaagattctttaaggcctggtacgtactattattctatggacatgattataggctgtagcaagtgaaggaggaaccgaggatgcgaaaaggcggggtgatgcttttgctcgtgctttttctgctcatttggcaaggtttggttcatcacaacagatacctctctgtcaagtcaaggctgtgcaattttgaccacaatctatcaaacagaaaattcatagtacagcgcttcaagaaaagcttgttttttctgtgctttgcctttcactgacaatttttttggttgtagattaatggaggagccagctgcatatggaaagctggggctggcaaatctcttggaacttagggaagaatgcttaagagaattccagtttgttgatgcctatagaagcatcaagcaaaggtaaaagatagtcttatctctcccctgctttgagttgctcttatgctctctctttcttcgaaattgatagggagaacgaggcatcacttgctgttttacctgatttacttgaggagcttgattcgatgagcgaggtctgtgacctttaaccttcctctctttgtaggtttatggtttgctactaaacgtttcagtgctatacatgagacaacttttcttacttggtgtttcaattgtgctcggatttttcaggaggcaaggttgcttacacttatagaaggtgttcttgctgcaaacatatttgactggggatctcgagcatgtgtggatctatatcacaaaggaaccattattgaaatatacagaatgagtcgcaacaagatgcagagaccgtggagggtgagagacaagaccaccctttttccccgctgaggttactttttcctaactgttaatttgaagctggaaatcttttttggtccgtaaaatcaggtagacgattttgatgctttcaaagaaaggatgcttggatctggaggtaagcagcctcatcgacataaaagagcattactttttgttgataactcgggagcagatgtcattcttgggatgcttcctcttgctcgagagtttctccgtcgagggactgaagtacgtgtctctctctagctcttcctatagtaatcttctcttcacaaaatcaaatgcacagaccaaatgatttcattgtgaaattagttgaggaaacactaaacaaaatgttattatgattccccaggttgttctagtggcaaactctcttcctgctcttaacgacgtgaccgctatggaactgcctgatatagtcgctggggctgctaaggtttaactttcgattctgtgcagtgtttatgatgttctttcatgtaactaactcttttgttcggtctttactcttgaagcactgtgacatcttgaggagagcggcagaaatgggaggcttacttgtggatgcgatggtaaatccaggggatggatcaaagaaggattcaacgtcagcaccattgatggttgttgaaaatggatgtggaagtccttgtatcgacctcagacaagtcagctctgagcttgcagccgctgccaaagacgctgatcttgtatctacaaaaccttctctgttttctacctgacataaacttcaaacacatcaaaaaagagaagctttgttctttatttgatgtttaacaatattgcaggttgtcttggaaggtatgggaagagcacttcacaccaacttcaacgctcaattccaatgcgaggctctcaaggtttaaacctcacttgacagaaaatttcagctctagaactgttattgaaacttttggctgaaaccttctcttcctttttggcagctagcaatggttaaaaatcagagattggctgagaagttgataaaaggaaacatatatgattgtgtatgcagatacgagcctccctcgctttaacaatgttatgtatcatttcttcaacctttagactactgttgtatacagattaagcattcgtcatgtggcatatgtatttttatttagactacacttttactgtataaaattgtatttgaatgaatcaaaatcacttgctataaagagcatcatgagggttcagttacatttcaagaacaataacgtttagtctgaaattatcgcgagcaatttctcaaccatgattctctgctgagtcccacttagagattccgagttcattattgcattggccacgataatgactatacgtggagctgtcgcatttacccaaactctgccatttaagcccacagctatctcgaacgagagtttctttccaagagcctcaatgaccgggcgcgttggtgaattcaacagcctataagagatgagaaagtaaagttgtaatggcgaaagaagatagataaagtataaggagacattttttatgaggaagtatatctcacattcttgaaagaccagttgaagtttcaaacatgaaaccatctctcaagggtccaaataatgcagctttcccactagctaatacatagaaacaagagacaattagtttaaaagggattaagagaagcagcactgttttagcctccaaagcttttaacttaccctcggtacaagacagctccggattcattcctatgtttgtcttgacaacccggagataaagcagagtgcctacctgtttagtacacaaaaatttgaacattccagaaacaatcaattcatagagaatgtcatatcccaaatgagaattcaagagagcttcctgagtcatcagaatgtacatgcctcaaacttgggaatatttcttcgtgttcctccttcgaatgcaagaactggcaaaagtgctaattgaggtcctttaatgtccacccaaaaattctgcaatgacatgatgagtaaaagaaacaattcagtacttactaaggcgatgttagttcatgcaagaaagcttaactgcagctgataatttaaaagtcaattaacatttgtttgtccaataatggtatcagttttcttctgattttagaccataacttcaatactcccacctatttatttactgatccaagaccatcaacaaacaagttcacctttattggctcagagaaatgaggactgaagtcgcggaaactgacaaacatatatttgtatcgtatttgacaactaaagtataataaaatgctttcagagatgaccagtctgagagggatccaaaaacaacacaagaatctatacaagcaatgatttcaaaggacttacatctgccctagaatcgaccacgattccaagaacatgatcatcagggcgaggtatatactgcaaaaaaaaaacataataacagagtcagcaacaaagagaacgagacttacatagataattaacaaaacaatattctactagagttttgaaaaccaaaaatggtaaattgtcttatcaagccagatgtatatgatcaaataactagggagaaaactagcaagaatgatccacaaaagcatcaaattgtcaaaatgctacaaaaggcaaatcttcaattcttcatgatgcaattgtgccaggttatttgttacttttctactcatgattaatcaagtggacctagtatccgagcagatgacacagttataatccacaagaagctcaatagagaagcaaccagaaagggaagattagtaagaccactgagctcacccgtttatgagaactttcgagccaatacttattaggcttggagtaacttaatttgccagctctcatggcagagatagcatcattatcctaaaataagccaaaaaaacaaacacatgtcaatctacaattcctttttagttgcaattgtatatcacaaatcaagtgcccactggaataattgttaggattcaaacaacacataagaaagagaagaagatgaaacctgaagaaggccacttccgagcttgattgtttggttattcatgtttgacaaatcaagaacaacatcacctggaacctaaaaattgaaaacaccatgcttcattgtaaccaaatcgaatcgaaatcataaaaaagccaactttttagagatatacggaccacaatctgatttaagaggcttgtgggagagacagaaactttggcagccatgagtgaggtgggttttggagataagaaccctaatatatgttaaactctgttaaagcttgttccttgacgacgatgagaacccagaaaggaacaacactgcacagtctcttcttttttttgcacgcaaattttgaaccaaaactataccgaaccagtcaatattaggatttcggtttacttaaaccgtaaaactaaaaaaaaaaactaagaaccaaatcaaaaccaaaccaaaatgatttttttatttaatacatgaataatttcaagcagaacatctcttagtaacagtgatttgaagaccatgtttcattgacaatataaaaccaagagctggcacaatcttctgtccttggagaaccttaatgtcgtagtttcgtaatatctccactgccactatcttcatttgagtcatagctagatgtttacctagacaagttcttggaccggcattaaacgacaaaaacttgaaggaaggctcatgttttatgcctccattctccgaaatccatctctctggcttgaactgcgatgcatcttctccccaaaccgctcgcatcctccccaatgcataaagacagataataatcttagagtttgcatcaactttatggccacttggaagcacatctgatttgattggagacttgcgtccgaaggaaactggtgggtagagtctcattgcttcacacaacgcaccatgtaaatacaccaacttgtctacattctcttggctatttcctgttcttgatagatcagtgttgatgttgatctcttgatgaatcttggctaccacatgtggattttcagagagaagccagaagaaccaagagagagcggtggctgttgtgtctcttcccgctagaatgaaagctaagatgttgtctctaaggaacttatcgtcactcggattcaagagcttgtacttggtcgtgtctagctttatgaaggaagttaaaagatcctgacttcctccattggaagtcccttgtgatcttttaatctcttctctcttggctgatatgtatttggcacacacgcggtcaaaagttgcattagcttcagtgagcttcttctcttgtccgaatcctatccagttttgcagcttccacaagaaccttggtttaaaatgcctataaagaatcccttctccaacatcgtcgagagctttagcaaattcgtcttcaggcatttcaatggagagagatctaggatcagaaccagttacaaggatgaaaattgtatcgaaagtgaacctcccgaagacgctttgcaagtcaagagttgttccttcctcagcaaaatgattaagaaggggaacaagaccgtacttgagtttacttgtcatggtactcattgaaaacctttgaaactcttgactatggagcatggcttgataagatttcctcatattcttccatagctccgagtccgtggtgatgaaactgtctcctaacacatcaaaaacatcttggaactccggtcctttgatgtagtttgagaaatttgagctcattatatgatgaatgttagctggatcaaccgtgagcaacatatccattcctgtgaaccgcggtcctttgaatggaaaggtcaagtcagaggtttcgagaatcttcacgctgtagtcgtagattcggtgaagcgccttgagcatagcgggtagcatccggagaaccggccagttcctagggtaccggccatgaggtttcttgaagagaaagtaatgaaggatgagaaagcaaaggatagctacggaaacttgaagtaagcttattgaagccattggagtaaggcaattgataacacacagtttgctgacacaatgagaactaaatttataagcatacacttcagggcacaagtaaggagatgctttttaaaatacacactaaatttcgttatatgcacaaactgcaaagcacgtttaatgcatgtatatcatcaaattagaaacttgtattaaattgccaatgacacctaactttttatttttgtgataatacacctaagtgtttcaataatttgaaaactgttataattgccccttgtaactttatcaactaatcaaaacttattgaaaccattagagaatgagctggattcacgcacatagacttttgagtgtgctctatgagcgctaaaggaaatgtcattaacttcttcatcctgtccaaagatgatgataaaggtttttagcatttaatattctctatctagtttcagttttcttccctcaaaattgcttgctataaagaaatgtctgaaatacctggagaaagaagccacaaattctgcttcaagaaagaaacatgctttatacttgaggacaatgatgatcaattgacacaatttgtataacctaaatccttacaattccaactttgtttgcaagaactgagttcggatcacaataaatatatgcaacagagtgcaatacaattatacaacaaacatacttaatacacatctttttgccttatgtactctcaaaagggtggtgtcacgtgtgtgtatatatatcgattacacaacactcagcttcaactaatttgctcctccaagagaccaaccgttttgtattataaagcgaccagtcctttgcttatagagaaaaaaaaatggcagtctattctcaggtcaaagcgactattattattattacctatctcttcaatgtttctcttgatgcttcatctttctcatcactattttcctcattcacatcttcagtggtctttacgtctttttggagagcacggagcattgcagagttcacctgttttctcaatttcgcattctcaacaaaaatgtttgccagtatcttcctcagctcgtcctccataattcttgtttcagtatccatgctgagagttttatcgatgtcttcagcagcagcattttcgtcaaacccagaaagtagctgagcctgaaaatggtctaaatcgttaaaacttgtaaaatgcacaacgttacagttttcattagtgcagcggaaacctaactatcctacactaataagtaataaataacttcatcctgatggacatatcgtgaaaagtaactcttattagaggaaactgattttaaatggcaataaagcagtgatgcagcaatacctcctcaatttgatcatcagatattgacagtaaacgcaaaacgtctgatattgtagttgagtcgtcgacaaagttaccgtttccatccattgacaaatttaagttgtactctttaagccggtcgtggagaattc

SEQ ID NO: 657 - DNA, 93257 bp, Arabidopsis thaliana
gcaatcgtcggaaagttttggactttacaccaacgccaaagcgagttcttgtttctctgtttgcttctctaggaccaatcagtttccatttacagatgcgtactattcacctgtcagagctctgagatttgtctttttgcatctctctgaatatttctcttttctcagatccattgacctcatccacatacataaagtttaggtatttttaaaagggttcaattctggggtttaccggaatttcatcatctttgaagaccatgagaggcgtcttcatcgtcatcgtaacgtgtctggttttcttaccggatcctctacgtgccggtgtagcgtccatcgggagcatcactccaggttttggaggatctcagatgaattacatcaacaacgatggtatcttcctcgaatccaacaactcagccttcggtttcggtttcgtaactacacaagattccgttactctgttcacactcagtatcatccacaagagcagcacgaaactgatctggtccgcgaacagagcttcccctgtttccaattccgacaagtttgtgttcgatgacaacggaaatgtggtgatggaaggaactgaggtttggagattggataattcaggcaaaaacgcttcaagaatcgagctgcgtgactccgggaatctcgttgttgtttccgttgacggaacttcgatctgggagagttttgatcatccgacagatactctgatcacgaatcaagctttcaaagaaggcatgaagctcactagcagtccttcttcgagcaacatgacttatgcccttgagatcaaatcaggagatatggttttatctgttaacagcttaacccctcaagtgtattggtcaatggcaaatgccagagagaggatcatcaacaaagatggcggcgtagtgacttcatcgtctctccttgggaattcatggcggttctttgatcagaaacaggttttgttgtggcagtttgtattctcagacaataaagatgataacacaacttggatcgctgttttgggaaacaacggtgtgatctctttttctaatcttggaagcggagcatctgctgccgattcttcgactaaaatacctagcgatctgtgcggaacacctgagccttgcgggccttactatgtctgctcgggttctaaagtgtgtggatgtgtgtccgggttgtctcgggctcggtctgattgcaaaaccgggattacttctccctgtaagaaaaccaaggataatgcaacattgcctttgcagctagtaagtgctggagacggtgtagactatttcgctcttgggtatgctcctccgttctccaagaaaactgatcttgatagctgtaaagagttctgccacaacaattgctcgtgccttggtcttttcttccagaacagttctggtaattgcttcttgtttgattatattggaagctttaaaacctctggcaatggaggctctgggtttgtgtcttacatcaagatcgcaagtactggttctggaggtggagataacggagaagatgatgggaaacattttccttatgtagtgattattgtcgtggtaacagtttttatcatcgctgttttgatctttgtggccttccggattcataagagaaagaaaatgattttggaggctcctcaagagagttcagaagaagataacttcttggagaacttatccgggatgcctattcggttcgcttacaaagatcttcagtcagcgacgaataacttctcggtgaagttaggtcaaggagggtttggatcggtctatgaaggtactttaccagatggttctcgtctagctgtgaagaaacttgaaggaatcggtcaagggaagaaagaattcagagccgaggttagtataatcggaagtattcatcatctgcacttggtgcggctaagaggattctgcgcagaaggggctcataggctgctcgcatacgagttcttatccaaaggttcgttggagagatggatatttaggaaaaaggatggcgatgttcttctagattgggacacaagatttaacatagcactcggaacagccaaaggtttagcgtatctacatgaagattgtgatgcaaggattgttcactgcgatataaaacccgagaacatcctattagacgataacttcaatgccaaggtatccgatttcggactggcgaagctcatgacccgcgaacaaagccatgtcttcacaacaatgcgcgggacaagaggctacttggctccagaatggatcacaaactatgcgatatcagagaagagtgatgtttacagctacggaatggtgttgctagagttaataggaggaagaaagaactatgatccatcagaaacttcggagaaatgccattttccttcttttgctttcaagaagatggaagaagggaagcttatggatattgtcgatgggaagatgaagaatgttgatgtgactgacgaaagggttcaaagggctatgaaaaccgcactttggtgtatacaagaagatatgcaaacgagaccctcgatgagcaaagttgttcaaatgcttgaaggtgtttttccggtggtccagccacctagttcttccactatgggatcgagactttactcaagcttctttaagtccatcagcgaggacggcggtgctactacgtcatctggaccgtccgattgtaacagtgagaattatctctccgccgtgagactctccggtccgagatagcaatctttttagccaatttttagtatcttatataataggtttttggctcaccatgttttgttgtatattgtttttgtgttacatcttaaaagaatagccatcactcagttttgtaacgttccgagatcaattatttcatagattacccgtcgtttttcttaactgtcacagaactccatgtcgttttacattcggaatgcgtgccgtggtcttccttctctctatcctacgttcctattggctataatgttttgcttactgtacgcttgtgggtagacaatgaaactcccggttcataaatttgagctagggtctcggagactctcgtcccaccgttaaagatgacgacgacgactgcttctctggttaagacttttctgtttcggtgcgactcgttttcatctttcaaattcaaatgcaaattcgaatctcccgcgaaaacgcgattgctctctccggcgaccgagaaacatgttgtcagatcgtcaagagcctggcgtattcgttgcttatccgatgatcctggtaagaccggattctggtttcgttggccattgctattttactgttttcgttttcttcgacttgtcctggctaattgcataatttgtaggttcgagtcatgttttcgttgcaagtagaaggaaaatggtagtcttgttgtcgacggtgcagcttctgtctcatatgcttccgcaaaacgggaacgcagctgagtgagtttgaacaaatccttaattttgtgtaattgactctgaatttggtttttgttcaaattatagttttccaatttttttgtactaaattgatagttggattttcaggatttatccggtgatgcaaaacgaaataaggaaagtggtgacaaagggcaaggctgctggtgtgcttcgtttagtgtttcatgatgctggaacctttgaactggacgatcattctggtaactttccatgactcttatgtattctgtaatcatcagaattttactttcaagtatagtatatctgactcgtttgtcaagttgctattttgtataagttagattgtttccttcattgtaaactcaacataggtgaacatggatatagatttgaaagttcctttatttgttcactggttggtgatagacaagtttgcaaatgtaaaaattgtttgttagatttatgtttagaatggaatctgtgaatttttggatgttttgggtagcttgtgaatgtttattggcttagtttaatagactatcaagtattgtgagaactggtttgttcagtggctctctcaggatgttcttatcattttacaatttaatatacctcagttttggctttgatgaaccaagcttggttggtttaggttcaggtctttgcgatttagtatacttctgctggtattttcctttgttctcattgaaagatactgtaactatgtcttagttcttcttggtaatgaattcaattgcaggtggcatcaacggatctattgcttatgaacttgagagacctgagaacataggtttgaagaaatccttaaaggcactaaatccctctcttttatctgttggcgtgagctaataaggatgtaattttcgcatctattttaactgctcttttttgtgtctatttgcacttgtttatcagatttgtcttattttcaaataagtaatcttcgtagaaaatggattctttgttaggttctagcgaaagcaaaggttaaggttgacgagatacaaccaggtaaattactatttgaactgtgtgcaccaaagaaacgtgttctgttatgcgcctttgtgctaatttcacattttatgtgatctcagtgtcttgggcggatatgatctctgtcgctgggtctgaagcagtttcaatatgtggcggcccaacaattccagtagttttgggaagacttgattcagcgtaagcacaacataaacggtttttaatcctattggatagatctctggtcactgtttctatacttttaacagggtgattgtttcatgttcacaggcaacctgatccagaaggcaagctacctccagaaaccctgagtgcctcgggattgaaagaatgcttcaaaagaaaaggattttcgtgagtccttagctgagaattgtttcacaatgtatgtgtatgagtaacttaacatcactgggtttgtgtgccattccaggacccaggagcttgttgccttatctggggcacatacgattgggagtaaaggctttggagatccgacagtttttgacaatgcatactacaaaatccttcttgaaaaaccatggacgtcaacttgtaagtctcataagtcataacaaggttcttaagttcttttactcatagagtttcagttttctaccattcctccctatgttctgaagattgattgtaagactgagattgtatatttacttagttttcttacaatgctgtagctaagatgacgagcatggtcgggcttccttcggatcatgctttagtgcaggatgatgagtgcttaaggtttctcatctactcaaagttcttaccttatcatttcatcacctatttttctctcaagtaccattcaaagtagatgaacacttagagagtataggatcattggcaagactgtaaactgttgatcactgttcttgccatttgagtaatctggataactattcaactgatatagattcgtggtttgatgatgcacaggtgggtgaaacggtatgcagaagaccaagacaagttcttcgaagacttcacaaatgcttatatcaaactagtaaattctggggccaaatggaatatgttatgatatctaatctagttttatattttgttagctcataagtgtttcaaacatgcccgaataatttgggtagtaatgcttatttgctaataagtaaaaatttcgctgcttactagtttactactacgaaactaaacataaaagatactcaaacttgacaccaacttacttctatgccacaccgaataataaattcggtgtttgatttgactttacaaaactaaaacgatgacgattctagtcttcagtgtttgaattttattcagcagtcggacgttttgacttttaacgagacgctaaaaccgctacgatttatgtcgtttaagcagttatttataagttaggtcgagtagattttacaatttatgttttgttcatgtagtaattagacacgaagaaaaggaataggtcatgtacgaatcgtcgtaggtagatgtagtttttataggaatatgccgtttctatgtcaaaagagatattaacatgtgtgttttgtctaacaacctattttttttggctactagtcattatctcttattatttaaaatacatcgtgatcaaagagtagtacaatcgcattcaattggataagataaaatttgatatgtgaatggtgaagcgaatcttccaacaaggatacacaccgaccaacataaaagcaaaatctataataaaaactgctaccatacttcacaatgtatagaaatccaagtctcaaggtgttgcgactattgccataccacgttgagatactactactactacatgtatgcgaaagttccaaaaaataaaataatggaaaaatgaacaattaagaattgatactcaaaaagattcatggaattaaaaaaaaaaaaattgatctgaaaaaattcattgataactaaagtagtataatcattttacaatacttatttgttattaaaactataattctaattaacaatttactaatttaaattatttatgaaaacattattaggatatatcagttttatgaaaaaaggttttccaattgttaatcccaataataaatcatttaaaaaaatttagaaagaaaatgctgagttagaaacaaaaggaaaaggaagcacaaatggagtaaaaatgtatgaaaataaaaagataagataatgaaattttgggattagatagagatgatggagggagaaagttttgagaagcagcaagaaaggaaaggtgtcactgttgtacttggtacctctatcttaccctaatcgctggaccaacttgtctcttaataaaagtggtttttgtgtctaatctgactttgcttactctctaatcactctatctctctcagtgctaatcaagataatcataccttttttagctgttaccacttttctagtaaaggaaattgtagttacttcaattatataaatttcaatagaaaacccatcaaacttaactagttgggaacatgcatggtaggatacttattttgtctaatgctttgtattttacttatattttacggtttattacatatggatacaatattttataattcaaatcaatgatggatagtattaatatttataacaagttcatatacacattcatgtacagttatggtgttatcacacaaccgaactgagtagtttattgacttgtaatagtgtcgctactttacctttttccaaaaataatgcatgtgtgaggagttgtcgacgatgatgaaaaaatgacttatgatattcttacgaaataaatctcactaaaatttgaggtttttttttttttttttgtcgtaaaatttgaggtattaacccaacatatttggatgatgcaaataaaaactttgaaagtaacaacgttaaatagcataagacattcgttttttcactaagcaaaacagtcgtgttgtacaatttaaggtaacaaaaccgtaaaaactgaaacacatatcaagagattatttgacattttcgaactgtgttacgttcttgactccagtattcacatctagacgagacgttactgtttattgtaaccaataatgtatatatgtttggtattcttatataagtttcttattgtttttttgcattgccaaagtgttttatgtgtctcagtgatcaacatcataatttgtatcaaagtcactgatatctttcttctcaaatctagtactgcataatataattttttcttagtaaatgtgctacaattttataattgttaaacttagcgtcactcatgagtcatgaaagctgatgaccaaaatcatacaggatataatatatgttgggaagaaaagagatctggagcaacacctactaagttcgctgattagttttctaatagttacttttaagtattactaataaactattacttcctctgtagtcaacgaaataagtgtagttaactttcatttgatttcttaaaatataaactttcattatttgatttaattcttttggcctaccacaagcttttgggtgtgtacatgtgggtgcatgtatttaaatatgtaacacttgtttttttatattcataaaatgggaaatgctgtacttgcttattaattactcactatttacatattccaactttgaaatattgttgattggtgaaaaaggtacttcataataatttaactaaattgtaccatcatatattcgtctaagaaaaactcaatcttttatcattgttgatttcacacacaattccaaatttgacacgagttatataacatgatacccatattcaacaaaccactagactctatatttatctttagttttaaaaatttgtcctcaatattaaaattaaggggttggttatatatatcaagaaaaataaaaagattccatgaggtggctttaatagttctgattaaaggtgttaattaattaacaagatgaataaaaggttccatttaagagtaaagtatatgataacagtgtgggggatgatattggttcaccttaataaagcgattgcaataattttatgtataactaacgaaaagtttataccgtttgattaagaaaatgagaaggtcatgtccctctctctctctctttctcttgtatttaaatcaaaagcaatctctaaccatatccaaaatcccccctaattccgggttttctttttataacaagtattaatttggacttggttcccacttatgtttcttctttttttttgccaaccacttatgtctcttttttataatcctaaacttttcatatgttttttgaaatgtcccatctagattcagttagtggattttactcaacttgtaatacgattctactacataagatgagtgaaagagttaacatgcgcttatttttaaggttgaaaatcgcaatgtacactctctagaattatagtataaaaataaaaaaaaatctaattcagatttttgattgttacaggctaacagcaaaattaatatggatttaaaagattaatactggaaaataataataattaaaagagttttaattaaaacttcccccccccccccccctcaatcccacgattaattaaaaaaggaaaccaccgaataaccgtaattactataatgacgtggcacttagatttcgaatagccgctgtaataaatattaaaaacgttttgtcattttcctttttctcttctcaaagaaaaaaataatcactctctctttttttttttttaattcacagacagaatcaaaacttgtgtagaccgagaatccatctctcacaaaccccaaaccaaaaaaaaatcaaaaaaaaaaatcaagaacaaatcgaaatctcaactctgtgaaaacctcgtccttgttcttcttctgcttctcccattccttcgatttttgcttcaatggatgtttgatttgctctctgactgcgtttggtgagcaacaagtccgtcttagtgtttatgttttgttttcttgcctgatttttcttctttcttctctatttggttgctgtctcaaatggcggatgttcttatgaatctgtggaacttatctacttgtctgttttcatttcatggttttgagtgtcggtagatcgaaactacaactgtcacttaccgattcactagtgagctcactaccactagatttagttttttgtctgcattagatttgcttccactcccaggtttgatttgcgtttctccgatttgtttacttagatcgattcagtaatcacaagttaggttttttctttctgttttttttttttcctgtgtggatatttgctctcgttgatcctgtggtgtaggcagaaaatgttgattagatgatttgaaaaaacctgacttatagggattatcttcggatccatatacaccattatgagtagactatgtatatgtattggataaacaagtgcttctatgttcaacactataaaaatgtagcttcaatattcgtcactgacaatgctgattgatgtatagctcatttcagaaacactagaaaaagctctgatttaagtgaatgctattttaggtatactctacaatacggttttattagtggtgtgctaattccttttctgtctcttctatattttgttgatttgtagtttactatactatggaccctgagagtatcatggctgctgatgggactgattctgctcctgcaaatggtggtttagcaatggaaaatgtatgtgttaaagaaaatggggctgtttctgtcgaaaccgtggacactacttcagaaagtcagaatgagaattcggcaaacagttccactttggatacaattgaacacgtcaaggaggcagctgaggtttgtaactatggatggtcaatctacttgcctgtcggataaaatagttgtgactaacatttgtgttttccccttttatggtagggcacacaagttgaacatgtagatgattcaaagtgtatgaaaggcgaaaaagctcaacggaagccaaggcatgagaaactatcaggtggtaagaataattcatcggttcacatcaaaaagagcaaagagggcaaaagtgcagatgctaaagtggcagcatcaaatggttctgttgctcctaatgtacagacaacaaatcctcttaagagcaaatcattcaatgggcgagaggcacaagtcacaaaggtaatcatccctcacaatttgcttctaggtttcttcgctttagcttatgcatatttggatgtgatcttctttctggctgatgattattgttgatctcttctttttccttcagcaagggaagcatgactctgcacctgctgaaagcgctgatgggtattgagtcctttttttagaaatcagagtttctttccatatggtcttcttacgggttcactgctagaacccaaaacatttgtcaataaatgtcatctagaccttggtgctaagtattgtcatttatctgttagttcctaatcaatcattgaaactggaagttttattccctttttgatacagggagaaggtgaaaccaaagtctcaaaagaaacaagcccatgagacatctgaagatgatactcagtcttctaagtatttctttcacctttatatttaccatctcgtctttcttgtggaaagctggggcctttcttcatttgcctctcatttttgcgtttatgttgataaaataacttgatggtttcttagtagtccgaaagcagacgatggaaaacctcgtaaagttggtgcacttccaaattatggattcagtttcaaatgtgaccaacgggctgaaaagagaaaagaggttagcattctggttcactagattgtcctctcgccacaaaaataattacatgtaatcatatatctgctttcatatggtgcagttctatgttaagcttgaggagaagactcatgcaaaagaagaggaaattaatagcatgcaagccaagtccaaggttgtctcctatacccaccctgtttattgtcatagtgtttagatgcttggcctcctccaaaacaaaattcttggtttctcgcaggaaacacaagaagctgagcttaggatgctaaggaagagtttgaacttcaaagccacacctatgcctagcttttatcaagaacctcagccgcctaaaacagagttaaagaaggtacttctgctctatgctcaaacctgatctcacttaatattaagtactaatattcacgtttcttgtaaaaattttgttcacgtccaagaagataccaccaacgagaccaaaatctccaaaactcgggcgaaagaagactgcttctggagcagattctgaagaaactcaaacccctcgccttggtaggctaagcctagatgagagagcttctaaagataacccaactgcaaagggaattatgccaacagttgatctgaagaagcaacctgtgcgcaagtcacttccaagattgccatctcagaaaacagttctccccgatggaaaacccgccccagcaaaagctgccataatcccagcaaaggtaagacctgagaaaaagaaacttgaaaaagatgcagaaaccgtaaaccagacttcacatcccacagaagaggaagcacaagtgacagtatcatccaatgctgatgtagaagattcacatgagactgtatctccaaggatgaatgaagacagagccgacaagtccattgaggtatctgaagcggttgctgttgagcattaaaaactctgcggtacgatcattactctcaagactcatcatatctcttgcattaagtaaggaggacaagagagaaagaaaccgtataatatttatatatatcttcagccaaaacttatatgagaagagatgggtaaaaagagtggacagaatcatgtggatttggttctaaaggttgctgtgcttttatatattcctatgtttgatggtaatgtttttaatcttttaaggtgtttttttctttcttttatgtcaagatcttccttctttttctttttgatgctttcaatcctaaaaggtgaatattcaggagatactgctttcgttctgtctgtgtattcttttcttttccttttttcttatttttgttattatggcttatgtgcaaattcttttgttatataattgattctcttctttccaaaattttgtggctatccatcaaagtgtaattagtaaacatgatattgtaggagatggattttgagatttcgacaaaaacgtacatgaagatattgtagctaagaggttgaattagtggtttgtttgcggataacctctagcaagaaagttttatgggcaaattgcaactgtcaaagacataacgacagttgagcgtgacatctctcgtaaccattgatcaataattgattcgctcacaagtctcattttcacaccttttttagctctaaacctaaggacacaaaccactattatcttctttgcaatccgcattttgcaacaataatgcggctttggaccttttgatacacattagcatcaatctacttcaatgtgtgcagaagatattttcctgattaaaccggacctttgagttttcattgtattacaccggtttaacatcagcacaaagagtcaagacacaactgatacagatgggttataggtagagtcagagaaaccatcctcatgatgtttactctcttcctcttccacttcttcttcagcatcccatagaaaccgagcatacgacgcaagaacattactgcaataaataccattcatatatcaaaattataatttttatctatcaatgattacgtattctatcatctagtgccacacaacttttaaattgcagatgcatagagaaaaaaataatatgaatgatgtctctttcatatttgacgtgtgaggctattgttctgatacaaattgaccaatcacttcttcaaaggttggatatagaggaaataacatttgatccacaaaaacattcagtctctttcaatgaacccattcatatgatataatctaaaaatctacaaaacatggtttgaagttatgaacttacttcatggagagactttaggaaatcccaaatctaaagtcaagtcatagttttcggatatcgatcattagggttctacggtctaaagcagattatcgataaacttaccagtcatcaggagaagattgaacagcttgatcatagtaagactgagcacgaacaccgtctccatgatttttccatatcaaatctccatacatagacagtaactctccatctcttccactctcagacaacatcgctctctcacagtactcctccgcttttctcccatctcctttcaccttcacaaattaagacatgttaaatttaataatatctcctcaatgtcctttttttttttatacacattaacttcttctgaaaaactgttaatggatgaaatctataaatttacgtttccaaaatgttaatacatgaattagtagattcaaccaatcaaaaacctaaaatcaagaacaaagctcgacttctttaatagcaataatacgtacttagttttaacttgtctgagtttgtctctatataaagtatcacgtgggttttgtcaaaagagtaaaataaaagtttcccaaattagcaagtataattaaaaacccttatcttgaaaaacagaggagattaaaacaaacctctttgaggaaacgagcgtagttagagagaaggagagtgtctccgggataacgttggatcatctcttcgtaataaccatctacgctcccacctccacctccaccgccacctccggcaccatctccgcctctaccaccaaatccaccgttggaacctccttgggggagtcgagatccttccaaaaccctcaaagacgccgtttcttcgtgatatacgctgatggttttcgttatgctctccggcgactgaatcttgtagaggtttccatctgaagaagctcttgtaatcggtttagcaacacgaggagtagcagcagagacggttcgagccgtggttaccacccttggaacagacggtttctgggcggcgcgtaggttaaggtccagtgaagacgcgcttctcattatcattgttagttcttgtggggaatatttcagtggaggaagagaagagagatgaaaagatatttagactgcaaaaatatcatggagtttccggttcttgtcaagccccacactattagtcaatattatcaaattgaccccaaagttttatcatttttggttacacccttgcatcattacatgttcattcaaaacgttatcgtaatacaagaatagtaagttaatctctaactttagatacgagaacgaaactaaaagctagttagcaaataaaacattttgaaagtatttgcattatcaggccaaaaacataagtagccttttctgtaaattctacgactatcttaactagatatcatttttggggattgttcccttatttatatatatcaaatcttatcggaaaacaattgttataggcttcaggaccaccataatcgaatacccctaaagaaaatatttcaatttgattggctacggaaagacgtaagtaactggatcaaagaatttgattctgtcccacaaataagttactttttgcattcttgaacttatttccacggtcatgagtcatgaccaaaccaagacatttggatttggatatatcgaataattttgctagaattgatgagaaatgactgacaagctttgatagtatatttaatgactaattgctgatgattttttacaatgacctaacaataacggaataactatggaagttttattattcaagataaaaccagttaataagtgttcacgatacaaaaaatcgattttcatcatcagtagtataaatgtggtataactaaaaaaataaagaaattgaccataaggtgatccaaatttcctaatttcatttataaaagggcaataaatatacactaaaaatgatatggaacttgaaaaaagcaattaaactgtgtttttctgctttctttatatagtataaaaatatttttttaatgaatcatatgtacaagccttcttcctcccaaacatcaacaaggaaatgcaccatctcctgtaccaatatcatcatcaatttaaaaaaaactttcctagcaacaatgatatatactagattcaaatcctgatatgaaaatgttctaagggggataaagaatcttctgctgtaagttaattaaaattaagagttatgattagcagaaaacaactaattaaccaaatcaaatcaccttaagaggtattggttgaggaaaaagcttgtttgtgctcaataagctatcatacgtcgagttccagctgaaatcatatgaattcaaagtttcattttaacattgacgaattcagtagaccaatcctatataaacataaaaatagttcgttcaatattcgtaactgtttgtggttgtcaccttattgcaggttctggaactagacattgttgtctggttaagcattcacgccattgttgtctcgtgtggttccacaaaataagtccttttatggaaggaaatgaataagtagtagtgtatcttttagtgtatagaataactgaatgagtaataaatactgcttgcttcataacataagtttttggcatccaaaacaacctaggccttagaagttagaacattcaaaagttaccatggtttacaaattcggtagagttgcttgtgctgcattggggatcaaaaggcgggtttgaagattgggactgaatcgttatattgtggtccatatcacacgtacttgtgctccagaagtcatctgatgaagcactatctttcttcactatctttccttggattttgagtccctttgatggctcatcgacttccacaactaaacgcctttctctgttgcagcatccgaaacagtttatgctctgaaagattgaacattatgtcaatcatttgttactatggtctaatatgtttgatctacttggaaagaaatcaatttggttctccgggtcgctcacattgatgagagttttgcaatttgatcgtagagattccattagccaaaaagggagagtttggaagtaagctgccgggaattggaagaaagagcaacaacgcttcttactaaattgtgttcgtaattttagcaagaatgaataacaagaacacatagctagctaatacatgacaggacaaaagcacaatgaacatgaaagagaattaaggaaactcaaaaaagattagcaaggaagtgtagtaatatgcctcatatgacaagcaaacatatgcatttaagcacaaaaggaatccatatgttataacttacaagcaagtaaggcatattatgccgcataattacatattttaccttgatttagtacaaagtctgtctctgaactgaagcacatatatacatccacatgatttaatagaatcttgaaaagaattcaaaagaaagaaaacaaaagtttaaacaccttccaacaaagggtattgttaaaaacactcgatcattattacgttgattttatatttcttctcttcttcacgttatttacagtttttttttcatgtaaaaatgatcttttcgtttgattcctatcgtaattgtaagtaaacaaaataaattttagtattattttaagatgagacttatatagatatgaatctatgtgaattattaaatttaatgataataaataaccaaaaactttaataaaataaactgttacatattgtaaaaaaaaagatttttataaatgtttatattcaaagagagaatctttattgagtacaaaaggaggaatatatgtgatagatctaattacataatctactttacataaatagaagaagatatcgtggagtgattgatatgtgattgatctagtcagatatcatgattgatccttaacaacttatatagtagttatgaatctacgtgaactatggatacaacatatccggtatatttctatacatctcttttgaatgcatgatccttaacatcggttttcactttttcacttgaagaaaagacgaaaccgcgtcggtgagtttaaattatctcattaattggtgcaggtctacggaatccatggaatgagctaaggtggagccacccgtaccagatcatttccacccaattcccactaacaaccagatggtattagatttgattgattccccaactccttaaagacacattattgtatttccgaaaataccctttataacgttaacattaaaaagtgtcaaaacgaagtcgtttctttcgagaaagcactctgaatacaccaccaccaccaccaccatgttctccacagcttcagatgcggctttttgaatacaaataaagagagagaacaaccgaacagagaataagagatacgaggtgatcactctcggaatctgggattttgtgtaataagctaccgttaagttgattttcatcaacgttgttgttgcggaatcgtaacagatcaaaaagatgtttgatggtttcttaggccgcggatttgctcccaaggggtttgtcatctttctccatctttattcatacgatttatctctctcaccttcaatttctctttgggttaaccgattttaaatgtgtgatttttgattcgaccagaaaaccactgataaaactgactaagaatcggatcgatgttctccggaggaaaaggaatgctacgataaagtttctgaagagagatttggctgatctgatcattaacggtcatgactacaatgcttttagcagggtagttttcttgtcctgttttgcttttcttttaagatttgattgattcggattttgaatgatttttgtattgttttgatacatctaggcaggagggcttcttgatgaactaaggtatctctggagtctcgactttgtcgagcagacctgtgatttcgtatacaagcagctctctaccatgcaaaagacgccgtaagttttctattcaatgcctttgatatgttgtatgagagatttccatgttagcctttttttaatttgtgtcgatggttttttttttgccattctcctagattattggcataatcttagtttatgttgtttgttttgtgttattcattgagttgttgtaacctaccctgactatatgaaaagttttttttgtatatctctgctacatatcaatgtgttaggttttaaattgactatcaggttaaaagattgaatattttgaactattgtcagttacctcatattttggcattttcctatccacactgttcctgtttccttagtgatgtgttctgtttccttaatggaacattctcaaagatgattcaagtatttgttctatgcggaaatatggtttggttcattagttgatttgggcttgttttttttttttgcagggaatgtccagaagattgccgtgaagctatctcctcgttaatgtttgcagcctctggattttccgagttgcctgagctgcgtgaattgaggcaaatgtttcacgaaaaatacacagattcacttgcattgtttgtcaaccaggaggtaaagagtttttctagtgtattcatttatttgtaagactcatcttgaaatcttatacggttaagttaaccacctgcttgtttcttgtacagcttgttgagaatatgtcatccaagcccttttctatggagaagaaagtgaagttaatggaagatgttgcattggagttctctattcgttgggattctaaagatttcgagaagaggattgtgagacagaatagtatttcagtaatggtatgacaatgactcatttgttttagggaacaactaaactgaaatatttggatagtgattgaattctgatttctttcttggacgtgaacaggagaccccaaaaagcaccaacgacaagtataagcctgtagacagaaacatggccttgccaaaaagagaagagtttgaaggttctgaaaatggggttagcttgaacagaaaaacggctgaggcatcagaaagaagagatcctttgtttcaatctgataaagaaagttatcagaatggtctcagaggaaatcagcgtgggctaacatataaagaaaggtcagagaatgttcttcacgcctctagatcggaaagcaaagacaataaggccgaaaggaaagagttttatctgcattctaagcaaaaccctgctagagaaaaacatcagcctatttttaacgaaggtgacactatagtgatgaaggtcaactatgggaatctcggtcaagggaatggacatcgacctggtgtagttgatgcgcataagaaaaccgagtttgttgcctcagaaaggaaagagttttattcgcaatctaagcaagaaccttctagagaaagacatcaacctatttttaatgatggtgacactattgtaatgaaggtcaagcatgagaaccacgttcaagggaatggacataaaaatggtgtagttgatctgcataagaaaatagaggttaatgcttcagagaaacttaagtctagcagcagcaaaagagctgacaagttagttatcggctttaaacaagagagtttctttcaagggtacaaacatgagaaaaatgaagagcatgcacatcagaaagtggaagatagtacctcaagacctccgaagccaaatagcaagtcaaagagagcggaatctatcaatccaggttcgagacatcataatgatcgggagagtaaagaaaatgcagttcttgtgggaaagagcaccgaagaagatccatctggtgataatgttaagggtggagaatacgaatatgatcatgcaaatccagcaaggaaagttgaggagcgagaaacagagagaatgaaatcacccttctacaaatcccttccacctccgtatgttaaaaaatctattgctaaagcaaggcatgaaaaagctgaagctttagataatccaaaggctcgttttgatggtgaagaaggaaatcatccagacaatggtaaaaatgtttatggggcagagagacgaaatggagcaggtcatcatgaagtgaatgacatagacaatgcatctctgaaacggcaaactaacagaagaaagcacattgtagaatcgggaggtgatgatcacataagtagccgaagaagggaaaactcaaggaaaggccttcaagtcttaattgacgaggatgagaaagacagtgaggagaagatgatggataaacttctgatgcattacagtaaaaaaccttcaagctatgaaaaggacaatgtgcaagaagaatccaaaagcagacgtacccatcttaaaaaaggtgaatctgatgaagagatgatgattcatcagccggctcggtcacggtctctacccgctgaacagttggccgggccatctgaacctgcaaaaacatttgcccgtgcagcctcgtttcagccagaacgttccagtgaagctaagcacgttcaccccaagttaccaaactatgacgatttggctgccagatttgcagagctaaaaggaaggtaaatatatgaacagttgatgcctagaaagatagaattaatgagattaaatagcctgttacacattttcttacttcttgatatagtacttgtccgatattgccccatgtatgtggtgcttgttataatagttgaaattggaagagtgacgcattgttacggagtacggaccccaagagttgttgatcatctccttgtttttggatcatcttatgtaaccatttgaaaacaaggatctgtttagaaaaagggaaagtggttaccacacagtttattactagcgagttatttgatgttaccatgatttttgcattaggtcctgaccagcactaacttacaagctagtagctaccatatacaagatataaatttacttctaaattaccatgaagtgtttaagttgatcttactgagaatattttgagtttttttttttaaatctgaacatgataataaacaaaaactattaaagggaaaagtcaacgagaaccctttttaaacgaaaaaaaaaaggtcaacgtgaactgcagagtgagcttagatgttcccaaattcgttcataaaccctaaattcaattttcccgatttatccccagcaattgtgtgatatcttctcaattctcatctttatcttcctccttacacagtaaaaaaaatacgttgtctgattactacttacactttttctcaaatctatcgctacgattccttctctcataaagcctcccaaaatcaatcatagacaatctcattaacagttttgtgttgatctctaactccatcgtcttaggagtaattaagtgaaagaacccaaattcgtttgtcatagaaaccacaatttcgagggatccacgcactttcacagtttgctacactttcaaaacaagccctggtctttgaaattggtgaaaatgagtagatatctagcaagatatatggtgtctagatacttctcttctgcttcttcccgtcctttacacgtttgcatcgtcggaagtggacctgctggtttctatactgctgacaaggtacacacgtctttctctcatattctgcaaaatatagtgtatgtaaaccagattttgtgatttatatcatcaattatgactcttagctcgtgatttgatggctggtaatcaggtattgaaggcgcatgaaggagcgcatgtagatataatcgatcgattacctacaccttttggacttgttcggtctggtgttgcccctgatcatcctgaaactaaggtaccactccttagcttaatcttgtttagagaaagactaggattttctccattgatttaatgtcaaccacaatgctttctacaacagattgccattaatcagttctcacgtgtcgcacaacacgagcgttgttcgtttattgggaatgtaaagctgggatcggatttatcactttctgagctgcgggatttgtatcatgtggtatgactttcttaactatgctcttatatgatttagattagcaactaattagctcaaaagtgtctctaacgacgcagggacctattcgtttgttatagtagttattatgtgtgttcaggttgtgcttgcatatggtgctgaaagtgacaaagatcttggcattccaggtgaggtatgccagttacaagtttcatgtggtcgaattaggtgtttagataggttttgacataagttagtgtattttggttgcttatacttgttggctatccattctgatgtagtacgttgactttggtagagtttgagtggtatatactctgcaagagaattcgtctggtggtataatgggcatcctgactacagtagtttgaaacctgacttgaaaacgtctgactcagctgtcattcttggccaggtactctaatatatggtgtgcgattaatagagcctattagttgttagttagcaggatgtacatatcaacaacagtttgataccgaaattttctagtaaatgtatttctcaagacctctctgacatatgatccttcaaaacttagggtaatgtagctctagatgttgctcggattctcttaagaccgacaacagagttggcgtcaactgatattgctacacatgctttatctgcgctgaaagaaagttctataaggtcccatttaaccgtttaactagttgaatcttgttcctttccatctttcctatagttgaaaaccaactacagtccctgatacaaagttgtaatgtgttcaggaaggtgtatctcatcggaagacgggggccagttcaagcagcattgactgctaaagagcttcgagaagttctcggtaacattcatatataaaccatatactaatctttttgattttttttttgatagatctcagtgggatcatcccacataagaaataacataagaaattgtgtttgggttttataagaatgtggtttggtgtgatggatttaggtgtgtgctgccatttttcagaccttgggttctattgttttcttatattttgttgaagtacttgctgaacacctctatctttaatgttactgtctactctgtttgttctgctggatatgggactgccttggtgattattttgctgcagtagttgatacttgatactatataagatgttgaatagcaaaagtttactcctttgccttaatttacctgtcttgaccttctcggggttttgtgagataataagtattgtctctattttctgatattcctatctttccgttggtgcattatctctaatgttttgttggcattggcgtttgctattttcccattggtaagaatataaacgcatatctctttataatacagggattaagaacttgcacattcgaataaagcagactgacttgagtgtaactcctgctgatgaggtacttgtgttactgactttcaattaaagtaaggctgaaccctgttatttgcatttttagtaaatttgtttatacctccacgaactgtatcttgacactcttctttttttcgaaggaagaaatgaaaactagtagagccaggaagaggatctatgaattattgtccaaggctgcagcagcagcaaaaacatccgaagcagaccctgatcaacgagagctgcactttgttttcttccgccaacctgaccagttcttagagtcagatgaaagaaagggacatgtttccggtgtaaacttgcaaaaaaccattcttgaaagtaagtgcaccttagttattctgtagattgcttagctggagacactagaaatagaatggtgatttcttaggatacaatagtatattttgctaacatttcatccatatctttcgtaacttgtaggtgttggaaccggaaagcaaattgcagttggtacaggagagttcgaggatcttaactgcaggtaatgtgctctctaatgaaaggtcttaagtgcatatctcttgtaactgttaaacaagaactataacaaatcaaatgaaagtatgttcaattttgcagtatggtgctgaaggccattggttacaagtctgttccagtcaatggtttaccatttgatcacaagaaaggtggtataatatgaaagtgttgtgtaattagtgtctacgaagaaaaaaaaatgaagttgttcggatttttttgactctgcctcaattgtttgtttcaaggtgttgtcccaaatgtaaagggtcgagtggttagtcacacgtcaggagacatatcacagactgaacctggcttatacgtatgtgggtggctcaaaagaggaccagtagggataattgccacaaacctctactgtgctgaagaaacggtaagcaacaagcttgtcgaccctgaaaatagaactgatgttctttaactaggagatatgtgtttgttgcaggttggtagcataagcgaggacattgaagaaggtgtttggaagagctcaaaagcaggaagcaaaggactgatgcaattgctggagaagagaaaagtgaagaaggtggagtttagtgggtgggagaagattgatgccaaagaaaaacaaatggggattgagagaaacaagcccagagaaaaattagtcacttgggaggatctattagcagcagcagccaactagggccatattttttttcaattaataaaattaatgatagtcttcttctttttttctttgggtccagagaatcaatgatttagtctagtagacggaaaaaatattactttccatttgttattcttttcaaatacaaatccatattatcttacatattaatgtgggattattatgctagttaaaagttaatcctaatctaaacagtaaacaatttacttagatgttaaagatttgtatatttgtcatgcaaatgtagatgtatttttaatgtaaaattaatgcttagttttctaatttaactgtagatagacttcaaattaaaaaaaaaaaaaacttaatttaattgaatttacctagcaattgaatgcaaataaatcactctgcagctgaaagaaaaaagcattaaagaaacattaaaagttttttttcaagaatctgtttccagtttccacatcattatttaaattaaacatgaatgtgaaatataggtcaattagttctgaaacaaatagattcatttaaaaaatctctaaatattatatttaaaaaatctctaaatattatatttaaaaaataaaactaaagctaatattttcactttaattttaaatttctcaatacttatccgtgtatattatcaagatgaaatttaatattattagtcatctaaatgatattatcaaaggttgtatctcttagaactaaaactaagttcataatttcgaattgttgacaagtaatcaaaagtattgtatgactcaacctccaactcaacaatataaatagatcctcaaatcaagattaaaattgtgagacattaccttcctctggaattgatttcctctgtgcatgttcaattttttttttactatgaaggattttaaaacattgttctcattgattatagttatatcatactatttcgaatatggagaaggccaaagaattctaagcatcaaggattttattattgatactaatcacaccatcattgattattctcaagtaatcattttcttaaaactgatatgcagttagattatcaaaattctagtaataatttccaatgaaatataaaaactatatcattttttaaaggcatttcaagaagcatggaaaggattatgcgaagatgaaacacccaacggctcagctttagtgatacgaaagaacgaaacatatactttacaaccatcaacttttcgaggtccatgcgtatcttctaacattcatattcaggtacttttgaagatgttaagtgatgtatataaagatcttgcaaaaaatctctttgcttcaaaacatgtttatgttaacaaagttgtaagaagtattttattttattaaacaaaaaaaaaagtattttattttaatgaatagatagatactatatatatcgagccaaacacttggtgcacatataagaacatacacatacatacatacataatattaacatgcatgtatgattctttttctttttgataagattgatggaaaactcgaagggccaaggaagccgatatattggaaaaacaaagaaaacaggagttggttaggtttcaaggatgtagaaggtctcgtcatcaacggctcaggagttcttaatcctcatggggaagcttggtggaaatctgttagtctctctaaacgaccaacagtaagtcattcccaacacaatccttttagtatatcttttacatttctatatgaatccacacaaatgaatttattcgtgtatgaacaagtgctaacttttataaataacttttcaagtgacaatcagggccgggttatactaaagtaaacaagtgctaattttgcttattaataacttattacgttttgtatctacagacaattagttttgcgtcatgcatggacattgtatataatggactacatcacataaatagtccaagaaatcacatttcaatttatggttgcaccaatgcaactttatcaaatcttgatataagcgcacccgaagacagtccaaacacggatggcatcaacatttgtctttcacacagaatccaaatcttagactcctctattcaaactggtaatctttattcttctttttgtttgaattttaatatattcatagattaaatgttggaaaatatgctaaattgctttatggatgtgtttattacatgttaggtgatgattgtgttgcaattactggtggaaggggtggttcttcagatatcaacattactggtgtagcatgtggtccgggtcacggtatcaggtttgttagaaaataaaagtacaaagaactttgaaatcatcaatataggtcttcataggtgcatgaatcgatttttatatttacaccacaagttactgcagtttcaaatagtttattatttttttgttgtgtaaattatatattttacatgattttctactaagattatattgtttattatgtccaaacttaaaacaaaacatagtattgggagtttggggaaagataatgagagagatgacatagtcgaaaacgtgaacgtaagaagctgtagttttacaggaactcaaaatggagcaagaatcaagacttggaatgtaaagtttgacttttccatcttttctttgctagcaaaatattttatttctgtttaaaaatcgtgtagtttacatactttcatagggaggacgagggttggccaaaaatattttgtatgaaaatattacattgatagatgctggataccccatcatcatcaatcaacactattttgacaacaaaaaaaaacactattttgacaagagtttcctcaaggtaattttcaaactgtaattatttttttattggaatatgaaaatctattgtatttattaggaatctaaattatatacatatataattttataatacattttaagaacctataattaactagtaaatcaattgaatttcgtcatgtaaaccaaaactttaacggatgcatataaacatatttgtttaattattttaatgaactgaccaaatgtatcatactgcattgtaatgactaaaattcacattcattattttaagattcaattcttactgaatgcaaactaatgatatgttatgaattttataggaaagtggagtgaaagtggacaacataacatttagatactttgaaggtactagctcaagtgaaattccgataaagctagactgtgatgaaacggaaaattgccataacatcacgatggaacacatcaacattacatctccaaccccgggtaaaaatctcaccgcatattgtaaattcgccgatgtgagtagctcatttgtcaacattgatgtcgattgtaatacaaatgaggatcatcaacctcatatattgtctcctcttccataaactatctactctagggcactctttcttgaaatgtttatatgtaagaacaaattatgctgataatagttgtacatgcatgttaactgaatgttaaatattggaaaaaatgggaatcaataatttaattagctcatttcaaaagagctactgaattttgaattttatctttaattgtgtttatttttacgtgaatgggtacattccatgattatttttaactgtgtgtttataggaatcgtttgctcttgataccataaagatgtgtattcaagtgatagtttcttatacagaggaagagagctagggtacatacaagagtagttcatgagaatatacaattgtacataattaaacctgcagtgttagcaatcatggatactgtaatcgaatcaatcatgaatatgattatatccttaataatgataacgataatatttgtatgtacgtcacttgaaattaaatcatgatatatattaaaatattagttttctctgttaaatgtggatattaacaagtctagaatttgaaaatggtgcatggatcttaagatattgtgattatatatagctaattttgattgggttgaacgttgaatgcatacttactaagttgaattaatgcaaacaaagaaagaaagaaatatgtagagttgatctattgcaaaactttgtcaagttataatcaaaactcaaaagtatgcaaggacactcaacacaacatctatacaactcacaagccacaaacacacaatcttactaaatttcttacatttcttttagaaagattggtttattttattatggttcaaatggtgagaaactataatctctctttaactacgcaacaaagcttacaaatttaaaatcgtttttaatattatttttttgctagagaacagtgaaattttatgggtgcagattcatttttttcaattttttccaaaaatataataaccatttactattactagggcttggaattactcttctcggtaattctaattgcatcgtaccatttgcaacacggagatgctcatgttaatttaagtatcaaggattttttatctgatgctaaaaatacaactgctgctcattctcaggtaaccgtttatatattatttagatccaattatatttttaatacataaatttctaaacaattcaatctcctaataggcgtttaaagaggcatggaatgcgttatgtgaagcaaatgtgaatggcacaacaacatctcttgtaataaatgccaacgaaacatatatcgtacaaccccagttgtttcaaggtccttgtgcatctcgtaatattcatattcaggtatttatcatcatacaattatttagctatatcgtcacaaaatgatcaacttttaaagaaatctcaatgttttacaaacatacatatatatatatatatatttatatatgtgtgtgattatatatgtttttgcaagattgatggaaaacttgaagcgccaaagatggtaagggagtggggaaactacgaaagtaaatgttggttatgtttcacaaacgtgaaaggtctcgtcctcaatggatctgggattctccatccccatggtgaagcttggtggtcctctattgagcactcccaccgaccacgagtatgtattttctttgtttaaggattaaattatatataaatatataatagactaacaagcaaagtatttacaatttattttgtttgtgtagacaataggatttagtggaagtagtaacatcttatataatgggctcactcagatgaatagcccaaagaatcacatttctattttagattgcaccaacgtaactttatcaaacttccatctaatcgcaccgaaagatagtccaaatactgatggcatcgatattgctcattcaaacaatatccgaattttcaactcatctatccaaaccggtatgttatgttcagttttatttgaattaaatattaattaatatgtgtcaatatacatggattaatcatgagaaattacataattccgttttttttgtgtggtgatttgtttgtcaggtgatgattgtattgcgattaatggtggttcgtatgatatcaacataactcatgtagcatgtggtccaggtcatggcatcaggttcgcacgcatcataaacatcttaaagggcttccaaatttagacttttgggtttggtttttgacagaattatacaaatatttctgattgttattatgtgttgcagaagtaattagattggtttagtacaaattcatctaggattatgatatatgtgtgattttgtacgaatatatatttttatatatcttacagggatatctttcaaatttcattttgacgttttattttgaaaaaataattaaatattaattgtgtatttcgtctttgaaaaatcctacagtattggaagtttggggagatatagtgtaaacgatacggtccagaacgtaaaaataagacactgcagcttcaatggaacagaaaatggagcaagaataaagacttggactgtaagagtttttttaaaaattaaacttatatacatacttttctttttgtttgcaaaattacatacgtctatttttacaaatttatataactatcatattacattgtacataatttcttagggaggtctcggggtcgccaaaaatatattatacgagaatataacattaacagataccaaatatcctatcatcatcgatcaacattactgtaatggtggccacaattgtacaaaagaggtaaacgaattatataataattttttaatttgcaaaatatattgtctttcgtattttgaatcttagacatctgttttgttagatatatatatatatatatataattgtaaatttcagaattttaaaataaaataatacaactgtttaaaatgttacaggcgatgactgctgtgaaagtgagcaatgtgacatttagatactttacaggaacatgtgcaaatgatattgcgataaaactagattgtgatgaagtaacgggttgtaaagatatcgtgatggaacacatcaacatcacttcttcatctacgaaaaggcctctaaccgcatattgtcaatttgcggatataattagtcactttgtctccatgaaaatcaaatgtgattattatgaagaacctttagtaccagttgaacctccacaacaggttgaacctccaacgccgactaaacctctggctccagctaaacctccacgacacgttggacctctaatgccgactaaacctccaaccatgtttcctaaacctctggcaccagctaaatctccacgacacgttgaacttccaatgccgactaaacctccaaccatgtttcctaaacctctggctccagctaaacctccacgacacgttgaacctccaatgccgactaaacctccaaccatgtttcctaaaccattggcaccagctaaacctcctgtatactatgctaaacctccagcgccgaatgctcaaccttcgatgttgtcttttctttcgtgccttatttaaatttttattgtgaactttctatcgcatttactatatcaaaactgtgatgagatagtcactagagaattaacgaagaaatctgttaaccagaaagctaatacactaaaagttataatttatctcatcaatcattttttttgttcatacatcagtttaaatacgaagataaacatttttctctatcatctattttttgtttttttttttttttttttttctttctgtacgtatgtatacgtatttattgtttgttttttcaaatgaattttacatccacaaacattttgaggtttttcttctttttgcgtttgatgtttgcatttctattatgcaaaacatcttatggaatttcataaaacatgtacgaatatttcaaaaaggttcaatttgaacttttgtctcataaaaacatgtaagcaaaagaaaaagaaaaaagactgatcagtcttcatgacaaagattaccaaggcatatatattcacgtcgtactgtaaatgaattgtgcccgtattatggacttatttttgggtcatagtcctgaagatgtgaaaagcttgagtcatgcgattttttccccgtgaaactcaccgttttagtttaattatgaataataaaacatattatcatgtgatgcatttagtaatttatatttttaatgttatgtgggaaatattatccatagaaaatgctatctctttcccaccccaatatacatagattttacggaatatttctcattttgaatatttatgaagctacctgagaaaattttctctgcttcctactaaaatatattttaggatattaaatatttcaaaatcctggtggataaaacaattaccaataaatagtagatacaatgcgttgaccatgcatactacctaagtattaagaatagttataaacccattaccataaaggcataaatatatagtctcttttaaattttattcaaattgatttaattctttaacaaagaaaaaaagagtcatattttttattttcgaaaatttgcaagtaattaatacatttatcaactctacacacatatatatatatatatatatatatatatatatatatacatacacacatcttacaacatacacactattaacgctccatttactaagaaaaaagtataatctatattttcattgattagtataaaaatggtgagaagataaaaattcgcattttagttgatattgttttttcattgtttcaggaattttgttcaagtatatattgtctcactacttttaattttactagggttttgagatactgctctcagtgcttctaattgcatcataccatttacagtacggaaatggtcgaatgattctaaccatgaaagattttatatctaattctaactctacaaatgttgatcattctcaggtaactatttatacaagtttatttatttatatccggatgatcaattaaatatattatatttttccagttaaaattgaatcattgcttgataaaattttcgaaataggcatttcaaaacgcatggagagcgttatgtggagggaaaggtggatcagcctcgtttgtaatacaagcccatgaaacatataccatacaaccacaattgcttgaaggtccttgcatgcctcgtaatattcatattcaggtataattcatacaaaggacgttatggatcttgtcatttatttgcatgtaacctactaacctctttgcttaattttgtgttcacattcctgattaaatcgatgacgacaccaaaccaaatgattggtacaaataaaatcttattagtttcgtgtacaatacaataaaactaagcgtaatcataattaaaagtcaaaacgaaccaaaattcatcaaagcaaaatcaaatcttctgactcgattggtaaacttttttggtactggggaatgattaatttattagttagaatgtgattatgtcagcaaagtttcaagaaatctcatcattttgcaaacctctcatataccttgttatttttccttggacaagattgatggaacaattgaagctccgaagatggcaaacgactggggaaggaataaacttgactgttggttatgttttgaaaaggtgacaggcctcgttctcactggatccggtgtcctcaatacccatggagaaagctggtggtcttctgttgctctccaatctcgaccagtggtacgttgaagctgcatattcaacatgtagattttaaagtatgcattaatagaacatttattttctgtgaggactttaagaacatatatatatatatatatatatatatatatatatacgcacatatattgctagtattatctacaatttacgatttattttttgcttgtgcaggcagtaagattttttggatgccaaaacattttatataatggattaactcagatcaatagtccaaggaatcacataacgattttggatagcaacaacgcaactttatcaaatcttcatctaattgcccctgcaagtagtccaaatactgatggcattgatatctctcattcacaaaatatcaatattatgagctccacaatcaaaaccggtactaccattttccttagttaaacgaaaattagactacgccatatacagattgatcaggagaaagattacaatattttattttatgatatttatggttttctacctattaggtgatgactgtgttgcaattaaacgtaattcatacaatattaacgtaacttacgtgacatgtggtccgggtcatggcataaggttcgcacatataaaattaattttcaaatatatacttttactatcaattcttgatcaatgtgtgacgaaagtacagtatcggaagtttgggggaaggaggggcatctgaggtagtacaaaatgtgaatgtcagacattgcaccttcactggaacacaaaatggtgcaagaatcaagacttggcctgtaagtttttttttattgtttgttatagaataaaataatatacataatataaaaaacatatatcatgtacttggacgttacataccctaattttgcagggaggacaagggtttgtcaaaaatattttgtacgaagatattactctaataaatgccaacttccccatcatcatcgatcaacaatatcgtgataatgctggtcaatataaacaatcagcaggggtaatatttttaaatctacagtcatattttaatacatgaataggtgcatgtgaccacaatatacatatgaagtgatattattttaatttgaaatctctaataaaagacgatacataagtgataagtgaatgtaactaaaactgaaatatgcttcaaccttgatattttgaaaatttaaggctcagagagagagatgctaaatttcacgtatttttttagatttgagtataacaaacatatgttgtgttctttcaggctactgctgtgaaagtgagcgacgtgacgtttagatcattcacagggacttgtgccgctcctattgcaataaaactagattgtgacccgaatacaggttgtgacaacatcgtgatggaacaaatcaatatcgcttcttcatctccgaaaacgccgctcacctcgtactgcaaatttgcgcatgtcgttagtcgctttgtctccattcccataacctgtagttttcatactgaagattctcaacctgcgtcactgaatcctcaaccttccgcaccgtatgctatatccccgacgacaccgcatactcagcctcatgcaccaactactcaacctccactgttctttcgtttctatacaaatttcaaagccttcttaggaaggttgggtcgtaactgctagatttattatagcaatatattgttatgagtagtcactgttactttactaaaaaaaataaaaagaaagttttaacttatttacaatagtaatattgtttcctgatgtgagcttaaatacaaagatataaataatgttatcagtaacacacgcgcgctaattaagaagaagacaaaattactttttacgtatttttaccaccaaagatgatcaagggtgttcattagtatgctatgtatgtgtacaagtaaaacgtatttagtatcctcctaatgactagaaataggactataggagctaggttatacattatcaaccgtttgtagacttgtagcccaaagacattacatgccgaacgtttaagttagaagtgaaccaattgtcgcgagaataaagtaaatgtatgtgactcacacggtctatgctcacaatgacaacattattgtaaagaataagtttcgttgttagtttgttactataatttgtttttttttcttataaagtaagttaaaattctttattatctgtttccatcactaaacctaacagtctatagctatgtatttaatgtcaaaatattcaaacctaaacatatatagttatatgcaattaatgtgaggcgagactaggaaacttaacatgaatggccaccaaatgtttgaacccaaaacaaaaactatatgaattattaaggaaaaaaagataagtttcactcttttaacaaagtaatgttgacttataacaaccattgactactaataagattaaaagatgcatatttatagttataaatagttaatgtaaacaagtaatttaattcatattgaatttaatattcacaaactgcaccaacctatcaaaattagtcaataaaaagaggtaagtgattaattaaacagtaaataagttagtgggcctatagataagcccattagtaaattggaaagaaaaaaacacctttaggccatagcacagtcacgccaaccctctcgctcgctacattagacagactctctcacaccaaaagtctctaaaaacacaacacacaaactgcgcattttatcctgcatccctcagacgacgctatcctgcgcaccaccgtcctcctccgttctcctcctcctccgagacaatgggaaaaggcggtgcacttagcgatggagtcatcaagaagatcctcctctcctacacctacgtcgcgatctggatcttcctgagcttcaccgtcatcgtctacaacaaatacatcctcgacaagaagatgtacaattggccttttccgatcacactcaccatgatccacatggctttttgctcttccctcgccgtcatcctcatcaaagtcttcaaaatcgtcgagcctgtttcaatgtctcgagatacttacatcagatctgtagtcccgatcggtgctctgtactcgctttctctctggctctccaattccgcttacatttacctctccgtctccttcattcagatgctcaaagctctaatgcctgtcgctgtttactcaatcggagtccttcttaagaaagaatcgttcaaatcggagacgatgactaatatgctctcgatctctttcggtgttgcgattgctgcttatggtgaggctaagttcgatacttggggagttatgcttcagcttggtgctgtagctttcgaagcaacgaggttggttttgattcagatcttgctcacttctaaaggaatcaatcttaatccaatcacttcattgtactacgttgctccttgttgtttggtgttcctcttcttcccttggatcttcgtcgagcttccgattcttagggaaacttcgagtttccactttgatttcgtgatttttgggactaattccgtatgtgcatttgctttgaaccttgctgtgttcctcctcgttggaaagacctcggctttaacaatgaatgttgctggtgtggttaaggattggctattgattgccttctcttggtctgtgattaaagatacggtgactccgcttaatctctttggttacgggcttgcgttcttgggtgttgcgtattacaatcactgcaagttacaggcgttgaaggctaaggatgctcagaagaaggttcagcaaggtgatgaagaagaagctgggaagcttttggaagagagggaaagtgaagctgctgcgaaacggaatgaaacagaagactgattgagttgatgatcataaggaaaggtttgtgaatttgatgaatgtgtggaattcagaggaataagagttgaagtgttaggatgattttggtagctttggaggaaaattttcaacaggattttgcgcatcatctttggttcacttctttgcttaggtatgatcgtctttcttattgtcaatctctctggttttgagttttagttgctatgttacttttaagttatggctgattatatttacatagtggatttgatggtacaaggattttagaagttttaatgtctttgtgatgatttacaatgtaccactcggatcttgtgttctatggagttttctttgtttcttatgaatctattttggtttacttttataatgccattgagatcctgtttggttctaagttattatcaagattcaagataaagatgttaaaagcatgaaactgaacctttgtgtcggaaagcaaacatgtttaaacttacaaacatatcatagagctcatacttgacatcgacaaactcaatactatataggttgttcagttttcactatatgagcttgtgtcaacaactatttgagcttgcctccgacataattcgaacaacaacaatcgttttgagttttgtgatgaaccagatctgaagtgggcttgagcccaaccccattgaaagaatgtttgtccagtccatgaacgcgagaaaaaaaaaaacttaaaagctcccatgtggcttacttctttttgaaattcagctggattgagtttcggttaaaggtttggtcacacgtgaaaactacaaaaaccgagacttcttatacggctctactacatttgcttgtcggcaattatttcgtggatttgcatttcccaattctagaaaataattgaatatcttaacaataaaatataaaactctttttaattttagtttcaaagaaaataaaaaaaaatcaaagcgccgcagtcgacgtcccactgacctacctaccaacccacccaaaaagggcaagaaaactagcagactggttaaaagtaaaaccctaaaatctcaacgaaagggacgaccaattgttcgacgattggtcatggggaaaaccggaatccaattgttcgacgattcgaggaatgggtttttctccgtttccgatttaggattcgattcgagcctaaacagctctaattaccacccaattggtgggttattcgccagcgttaatcagactaatccattcgcatccctctcgtcctcggatctttccaacagaggcaacaacagcttctctacccagctcaatgatctctacaccaagtatatgccgggaaaagaggaggaggaagaagtagttaatggcgagaagaggaagaggaagaagaaaggtgggctcacactgaagattaagatcgctaatccttcgttgcggcggctattaagcggagcagtagctggagcggtgtcgagaacggtggttgcgccgttggagacaatcaggacgcatctaatggtgggaagtggaggaaactccagcactgaagtgttcagtgatatcatgaagcatgaaggttggactggtctcttcaggggcaatttggtcaatgtcattcgtgttgcacctgctcgagccgtcgaggtaccactatgataatcctaaccaaacatgtatcattgtttataattgaaatgcagattgagcaagtttctgacttttatactaatatatctcgttgactctttacctgtgaaaagtcttgtgtcttatgctgaattgatgagactttggtactcaactttctttgttttccaattcttgtatgtgtagctttttgtattcgagaccgtaaacaagaaattgtcgccgccacatggacaagaatcgaaaatcccaattccagcttctttactggctggtgcctgtgctggagttagccagacactcttgacataccctcttgaactagtcaagactcgccttacaattcaggtttgatccatttagattgtattttgttagaaataattaggtgatctcactcccttgtagctgaaggatttgtggccttagtacatgtcacgttgtttttgacaagaattcagttagatagttcattgtaatatcggatctatatagttctttgctcagtaatgggtcttccaaacttattgcagagaggtgtttacaaagggatttttgatgcgtttctcaaaatcatacgcgaggaaggacccacagaactctacaggggtcttgctcctagccttattggagttgttccatacgcagctacaaattactttgcatatgattctttgagaaaagcataccggagtttttcaaagcaggagaagattggaaacattgagactcttttgataggttctttagcaggtgcactatcgagcactgcaactttccctcttgaagtggcccggaagcatatgcaggtgggagctgttagcgggagggttgtgtacaagaacatgttgcacgctctggtgaccatacttgagcatgaaggtattctcggttggtacaaagggcttggaccgagttgcttgaagttggttcctgctgctggaatctccttcatgtgttatgaagcttgcaagaagatactcatcgagaacaaccaagaagcttgattttggaattgtatggattcgtggcaaattttaaggattgatcagagaaacacattgtggatactaattgggttcattttacaccacttgagatttcacaaattagtattgaggggggattaaaagattcactctacctttttgtttgaactttacgttttcaatttttgattgatctgattctgattcaaataagagtttacacaatatctcttcaaatatgtaactttactgatcaagtcccataatgacaaagatttcgttaaaagttcaaaaaaataaatgtcattctatttgtactgatgggtgagacaaaacaagagggcgagttcacccgaagacatcaacacttgcaccaacaattgacgtacaccatcatatccataaactttttgtagtaaagtgaaaagcttagcatataaacttcagattcttagataaaaagaaaactccaatccctttttaggacaacaagttccaacattacataagtgtgagtctaacaagctttaaataaaataaatataagaaagaataacaaattctttttgtagactatgtatcatttgggtccacatcttcttccccactggaaaatcattacaatagtgttacgaacaatttcaccttctctggctactcggagaaagctaatcttggacatggaatcaccttaactgcccggttcactggggtttgatgggtttagatgatttggaattcccattgcgcgtttttgatatatgcacacacaagtatataaatagggtctaaaagacacctcctttgccattgaagttgttggcattgggattggcgtccacaaagggattgatcctgacccaaagcaacgagaagatggaggcgagaagaacagaccagacaatgacgatggttggtgttcggttttgtcttcccaacagacctttcaagaaagggtagagatgggcaataacccataaggcgaagaagagcttcccgaaaagcggaccccacgactggtagccactgtttacagcataagagacaccagccacaatgcctatgaggttcacaagtaggacggtggttggtggaatgagaagagctgtccatttgaagatgtagagttctgcaaaatccccatcttcgtctgtggctttagatgtaacggtgaagttggtgtcgataccagcaagaaccttaagtagaccttggaagacagcaaaaagatgggcggatgtgccaccaatgacccagaactgctcgttcctccaccaatcctcaatgctcacaccgctccatctcagctccaggattccagtcacagcaattgagatgaagagtagaatgaaccaaatactcgcgtagttgcttatctgcaacaatgatgatgacaaaaaaatgcattcacaaaatgggattcaaatagtaaatagcagtgtggtcagttttacaaacctcgggtatgatgaatctgtcggtgatgagacaaaaagcgggaagaatacaatacgcaataagagggatggatgtaataggatagacgatggtgttgatataagcgatcctctccaaaagtctcaaccttccatggtaaccataccagataggacaatgtctgctaagaagaatctcgatagatcccaaagcccatcgaagaacttggttcaaacgatcagaaagattgattggtgcagatcccttgaacgcagggcgtggaggattgcagtagatcgatatccaaccccgggcatgcatcttgaacccagtaagaatatcttccgtcacggaaccatagatccaaccaatctaacaaaagtgccaaataagatgtcatcaaacaggtaagaaagagaacataagaagattctgtagctgcatttgaaaactgacctctttgccccattcagtcttgtcttcgtaaccacagcttataacatgaatagcctccttcagaagagtagcgggattggttgttggtggaatgccgccttgttccatgaaggttgccgcaataaataccggcgactgaccaaaacgcttctctacactcctctgggacattagaatagacctctcatcatcataacctgcataaacaaggattgtaagatttcaccatcacataaatcattacataaagaagtgatgttattacacaatcagctcaatcaaaccttcaaaaccctcatcgatgtcctccatattgaaaagtggagcattggagtcacttctgttgatgcctctcctcttttcgtagttatacttcttgctacttttacctttcttccttgacccgcaacagctcttgacaataatatttggttctaaatcttcttccgtcaaaacaggatcatacccatatagagcctgcctattaaaacaacaaccagtacccacatatactggaccctggataccatccaaccccttcatgttaatctgcccaagagaacaaatatccaagtcaggccatagcagaaacgagtaaatccaaccaaaatatgaacaaaagagaaacaaaagacaatggggaagtgatactcacatcgaaaaagactatattcctgttggcatatcgatcgtgcaaatcaataccgtcaaaacgttgagggaactggacatagcagcacttctttccaatagccgggtccatcatgaaacacatagcttctttaatagccttactgttattaaagtaatgatcacaatccacgttcaaaagatatgctccattggtaagaacagcagatacacggatctgtcaaagtaaagagatactaaattaggagagaacacatagcctagaaaaaaaagaatgtgaagcaacggctacacaagaagaacgtttcttaggcagtgaacaagagaataaaatagaggacacaataggattctgaaagttaacaaaccaatgcattcatagctccagcctttttgtggtgttgaaatccaggccgcttttcacgagaaacatagatgagtctaggcagctcatttccatcggtatccagacccccactatggcctaagaacacctgaaattgaaacaaaacgatgtaaacatgtttcctttacgttatcctctctgtcacaatcaagggattgccacactgtacctgtatcattccaggatgatctctagtgttgttaccaggccagggagtaccatcctgcattgtccagccttcttcagggattttctgtgctttggcaacaagagcatttatcctcactttaaactcttcatactctctctgtcaatacaaaccaaagaaaaagtcagtcaatctctttgccgtatggatgagaagcaggtggacttttcaaatgaccttcatagctcgtcgctctttaacaaaagacggttggatcttgtccttcaagtaatctatcttctgggcaaaatagaattcaggggccctaggttcaatgttgaatttcttgcaaaatggtacccatttctttgcaaactcagcggtttcagaaagggattcaaaggtaagcatagctgaaccatcatctgaaacataacaggctactttatctaccgggtagtccacagaaagaatcgagagaactgtgtttgctgtaacaaggggaggctctttcaatgggtccactgtactaacaaacacatcaacaggaacgagctgtgatggttcaccgtctcgatcatatctacaataagaaaccaaaaaatcaaaacacatataaaatcagtataatagctaagctctatcttaataaacactccacttggcatgcttctatcatagtctagtcggaaacttcacatggtcagtagattgcagatggttttctactaaatttcaagatttacaatcataatcttcttaagatatatcataatcaaaattcagatgcaccattgtctaaatttaaattaaatttacagggggaaaaagtcaactatcgaaaactgtgatagaagatatcaagttaatacataaaagagagatgagagtaggggatgtataaacttaaagaccaaccttatagcgagacggtcaagataagtctccctgttaatggggtaccatttgggaaactgatcaagaagccaagaaaatgcaaaccagatctcacagataaccgaggtcaaccacaaaggatatgcatttttcacagggtgagttgtacgatattgcaagaagaaacacaagatgataagccggagaataatcacaacccgataaggggttaggcgagaagatgggataggcaccacacgactcataggaagacgtgtatcatcagccctgtaagtacgagaaccataattgagtggaaggaaacaaatgtaacaaagcagatacttaattatgtctatcaatacataataagaaaccaagagtggttattagcatcacggccaagagctgtttgagttggacaataaagatattggtctagtatttccacttacatttggagttcttcgccattggaaccagtcccttcaatttctcctcctttcccttcatggtatttaccagtcatctgtaacatatttttctcctgcttcagcttccagccttcaactctttctttccagtcaacattaccaagcccataagagttcaagtcttttgacgggtccacgattcttacagggactgcaatttttagcgggagctatcagttacggtacacaaaatatatatgttgtaaaaatgaataggaatcacatttaacaaagaccacgtgcacaagggaaaaacatatgaataccaggttgccgtggatcaatatatggagatgaaatagcattcctgtcagaaggacccaaaggacctgatgtagttcgcacagattgtgtatcaggcgtgcgaatctctccagaaacctgtgtatagaaaaaggtcatgaatctattgaaaacagacacaactaacaacatctattattatttcttaatttggatgaccatgtactatcagaaaaaaattctgttaagatttgttcacatataacattaacgtgaatagtaagtaataaatgaccactctagggatttattgagtaatacaaatcactctagagtctaaagggaaaatgtaggtccctaccgtatggccatgggtgagaagaggaattggttgagattcatgtctagaggaagaagaaaactcttcgccatggcgttggtgtctcgccttgttagctccctgggcgtaattgaactcattctcgatatcatcaacatcatcctcatcttcatctccttcaacacgaggactccctggaaaattccaaaaaattgttcaacacaacagcaaagaaacaaaaagagaaaatccatatatagcaattgccaacaaaaagaaaaagacaactgacccctgtgtcgtctgaatctagtcttgcattgagggcaacactgagttccatctttcctctcgtactcatagcaaggccgacacacagggaaggcacattcattacacgcgacaaagacatctccagtttcagcgagtccaacatcatcaccacagatctgacatatctggccattcatattcttcaaaggtttggtctgcactttgaccaacattgcatcattgttagtcattgagtattagaaactacagaaagagatgagcaaggatctaaatcaaaacaatcaatgcagatctgaattaaggcgagtcacagtctgtatcccatggcgggaactaacgagatctagttgagctaaatctcaataagtaaagctaaactttaagagtcaaagattttagcttaaaaaagttaacgaactgaaatccaccgacactttccataagagattttaagaaaacagatgcggcattaattgatatagatcacaacaatttgaagaattggagcagaaaagtttccattttcagacacttacttgatcaactgacactaactaactacacagtcaaaggaagcgaaatctgagtttcaatgatccaattatggatccaaaagagacgagatttagaaacagagaaatctagatgagatctacacatcaaaaattgtaagaacgaaaaacaataacaaaaaaatgggaaaaagggaagatgaacagaccccgccatcagattcatgtcggatccgaacgagctcgtttctccggtaggatccagcaaccaagccggcactggcctccatcgcagccaccgacacacagagaaagagagagattcacaaaattcaaaattgggaaattcgtagccgattcaatacggcatctcgaaaacccaaatctactaaaaaaggatgttcacacactcctctgtcactctctctctctatttgatatctcaagctgcttcttcttcaaatctgcttttgcctattttatcgcagagtgatgtgttttttcttaatttttaaatgacaagtacattattttaccggagatggtgacggtagtagtagcctcttcctctcccaccgttttagctcagctcggctctattcggctcaagttatcatctctctactttttaaagtgagccgttctggcttccccactagacgcgccagcttcttagtatgtgacgtggcaaaatcttattgcaagaaagagataggacaaagtatgattgtttgattatattaaaaaaaaaaaagaagaagccacgttgttgttggctctggtaccagcctgttcttttttatttgctatcacctgtcggtggactcaaaataactagtgttgattaggttctaattgttagcttaagaagttacgggcgaattcgcaaataatttttaaatggatgccacttctttttttaatcccattttgttgttatatttacaagttttaattcagtatacagatttctgagttttaattcattttttgtgtcaataaacttttaacaaaaaaaattccattaagaaatcattttaacatttttatatttagtgatagtgataatgacggtggtatagtgatatgatatatatgtaggaagaaatcgtaaattatattgattatccaaataaataaattacgatgtcgttgttctaaagtttggtgacaaacgtcacatttagttatgcttaattttatgaaagtttaattattggaccaaaaccaactccgcaacgaataatggaagttaacatttgtcggcaaatggcaacaaagaaaaaatgtcggcaaacatcaacagaaatttttaacaatcttggagcataatcaaacaaacatacgcaaaagacaatgcttatgttttacagaagtaaactacttactctctttaccatctcttctcagtaaaaagaacaaacacttaacttaagggtaatcattattcattaatcataggctactaatccctttttcccacctgggctattatccgaggatgtcgaatccgacttcgatggagaccttgccttggatggtgatcttgacactgatcttgctttccccgtcccaatgggagattttgaatatgactttgatcttgatcttgacctcgatggactcaggctgtggctagcggatggtgaccttctctttctgtaaggtggagatcggctacggatagggctgcggctgtaccgccggttgcgataacagagaccaggcgatactgagcggcttcttcttctatacctgagcatactttcgagttgtgaaatcaagaataattcttttggatcaccaattttagttccatattcatgaaacttttagatgtaaagaatcagctgaaacaatgtactaaagaggataagtaccttggaggtgttcttcctcttagtgggcttctgaaccgacttggcgagaaccttctgcgacttctaaatctacagagaagacgttataaaaaagacggttcagtacgagagtgtgtaacagaaagggggagttatattatgtgtgggctattcacctgtcacggtcactcctatcactaaagcgataaggagatcgatcaggagatggactagttctgtatcgacgggcgtatgagaatctttggctaaatcctctccctctccttatgcgcccattaggagaagcacttcttgacaaacttcttctgcggtcaggaggaggagatctaggccgcacactccttctccttgccggaactggacttctgctaattcttcttcttcctctaacaggactcctgctgatacttctcctggacaatcgaataggactcctgctgatacttcttctggacaatcgaataggactcctgctcacactcttcctagatgatcggactggactcctgctgatacgtctcctggatgaacgaaccggacttctgctcacactcttcctagatgatcggactggactcctgctcacactcttcctaggtgatcgaatgggactccggcttaggcttctcctagacaatcgagtgggactccggctcagacttcttctagataattgaataggactccggctcaggcttcttctagaagatcgaactggacttctgctaggtgatcttcttgacgatcttcttagtgggcccctcccaaggcttccacgagatgcagatcttacaggactccggctagggcttctggcaatcctacctctcactggacttctgctgatgacccttttggggctcctcagtggacttctgcttaaactctttgaaggacttctactaatatctctttcctttttcacccgcaccggacttctactaacacttttggtagggctccttctgacatgcctgcccttttcctcactccctgggctttctcttctactgtttgtcaagttcttcacttggcggctacctttagcaggacttctgcccccattccatctaggacttgaactcgggctcttactctgactcctccgaggactaacactcgtgctcttactcactgtcctcttaggactcaagctccggctcctgcacattaactttaaaataagactgacttcatattgaataagagagaaataaccaataaatgaggcgtagagagaaaagaaactagacctagatttactaggatgatcatcgacaatatcaggttgcctatcagaaatctgttctgatgcagcatctgaaattccattacttctcagccctctgttttcaagcaaatctggtcctttccttttgccctggtgaagtgattcagcttctttttccaccgctggtgcagaattacctgattgaatattgtcaaaaacagaatgttaagagtgtacagtctcattattaaactgcctacagaaattagcaaaaaaaaaaaacatgtcggcaatatgaagacgcatgatcaacacaatgcttcaacaaaaggcaaattgacactaaaatatgttatgatcaaatagcacgcaaagtattttgtcccatcccaacatccttaatttcggacagaccaatagaaaaagaacaaaaaaaaatagctgaaacagaagccaaaagtcttgagttttagagactacctgttctacgagagactctgtgtttcctcttttttgctccaatttcaacattgacatcactaagacttgcttcacttccactattactgtcttcaagactgtcaggggacctgaaaagttgcagaacacaagtgaataactctggagcagatacaggtaagtaaaattgttaggatatctatcaaattattacatcctagaggaacaaaattaatctagcttagatccatagaaaataataaatttcagaaagtaaccagcattgacacggaaactatggctataacaagtgaagtgtacaagacttgcaaccttcttgatttgcgtttcggtctcttatcacgcatactccgctttttctcatggcgcttatctctctgtttagaccgcctgtgcttgtctttctttgaacttctttttctcttcttctgcctttcatggctcgaggaactaaggaaggaaggtgaagacaagtctgaatctgactcactatcagattctgaggaatctgtctcagaatctgaagagctctcagactcagatgaagagtgtcttcgcctcttttttcttctcactcttaaagacttcttgtgctttccattttttttaccgtcacttttcttcttatctgcatggattggttataattgtgaaatcatgacttatgtagtagaaaccaataggagcagattcgtacctccagaatattctccacaacggattatcttcacgctgacagtaggtttaccttcctcatcacccacacgttcaatttttttcaatatctctttcccttgaattagctttccgaaaacaacattatttctgatgaaaatataaaccagtcagaaataacacaatgcccaaaggaaaatccacattcctgaaataaacaaagtaatattgagaggaaacctatcaagctgctgatttggcctgaaggtaatatgaaagtgtgatccgaacttgtcacggtctgcaatcgacatagataaaagaccagtctcctcatgtcttagtttcggtgactcatctggtaacatcagaaattgattttgctacttagtaacatatttaaagggaacaagcaaaagatgtgatattcacaagaagaccagtactttacaataaagcaatgcgtccaaaatgaaagattatttgttaatacaatctttatttaagcaatgaacaatgcagaaatgagagatcacacccacaatagactatcaagactctcatatcttgctagggtaattgtaaagagattgctattaaaaatcgcagtggtaaaccaacctggaaattttccggcatatatgctttccccagcagtacctggaaagtggaagaaatatacaaagtttgtcagatgataatgaatttgctaatgttcactgcataacctattgagcactatctaatgatccaataacctccacaggaatctaatgaatgcagtcccatgcaccaaatagctaatctcagtttaatggtattttcagacgactatgattacatgaatgatatatagtttctcaagcacagttaataagctacaaactgtgcgccatagatagaagatcagaaaaggcgggaatcaataaatttaactgatggctgtatttgatgtatttcaggagctgaagaataagtgtacataccatttcgattcacaaagtcaccggcctgaaaaaaggtcaaaaaaagattgttagactagtagcaacattgaataggttggtacataaactgtactctttgcatgagaaggcctaacgtttgagcataaacaactagtagtacaaccttaaaactatatcacatgaaaagcaggtgttgcgatcagacctgtatcctacagcatagagaacagcaacgactaaaaagaccaaaatccaaccaatgtcgataattaaaaaaaaaaaaaaagaaaaaaaaaaacaaaagtataagaatgaaacgtcatatcaataaatgaaagatgcagatagaaacctgtgctgaggaacctttcattattctatggaaaaaggatcctttataatgcaaaggttttccgcttctgggtccgatgcctttctcccctatatagattttataaggggaaataagtgttaaagacaaggaaaaccaacagtcaaattaataaacagcaagaaagcaacaagcttagccggacagaaaacaaacctgtgcatagtgcacggaaattctctgatgttttgggagcgacttcagggaaaagctaaagaaacaatgttaagatttttaacactttcgctagatcaggaaaaatacaagaaagtgaacattaacatagccaaacactattgtacctcaaaaaccatagtctcagctggatctccatcaattgatacatccataaaaacctgtggattcttcttttttgccatgttttaggtatagcttcagaaattatgacctgtggatctccagaaattatgacctgaaaaatccagagaatgcacagaaaacacaaaggagactcagaaatctaaatagtcctgaagaatagcgcttcggagacataaattattagagcactgaagaactaaaacccacactacaggatacttcacagtagctgcaaactggtaaaccacccaacagtcagtgtctaataatgaccttccaaactataaaacttctagacccatcaattaatgacaatgtcgttgcaaaaatgagatttttatgagctcaacaatgtacaaagatcaaataaacaatgtgtacggagattaatcgtcaagcaaatccatccaaacttacaatttctatagaatctcatgcccacaacttctcagcactagcatagacctagacgtttcacggtaaataaattcacgaaaattcttaggccatcaaatacactaaaacgatcatatcagtgaagtgtacatattagtggaaaatgatgcttcaacatcaaaatccagcaagagagtgcaatcatctgaagagaaacaaagaagattcaggtcggaaaatcgctagagttttacctgagaatacgcacgcagagccacagaataaaaacgactgagcaggagaaaaacctagcggaagcttaaaaaggaacaaaacaccagcttctccgtattgccctctaactcaatcgttatttacaagtttaccctcaaaactctcttttgctctgaaaatctctctctctctgttcatcaccatttccctcagaagctaaaacctctcttcttctccgatataagtacacttgttgtcgaattagaatccgactagtttgcttctcatgacccttctgaactatctacactgtaatcgctcaaaatcatttctttttcagagattttactctccttatagaattgctcacaagctgttcgatggaagttcccaaagaaatgcgacaacttccattaaccattcaatcagtgaatccttacggagaaattctccggcacgagctctttcgatcttcaaggaaaatctccagctgggttattttggtcgtcatatggacgaagttactctttgtcttgcgcttaaagcatgtcgtggagacttgaaacgcggctgccaaatccacgggttttccacaacttctgggttcacttcctttgtttgtgtttcaaacgcagtaatgggtatgtaccgtaaagccggtcgctttgacaatgctttgtgcatatttgagaatctggttgatcctgatgttgtttcttggaacactatactctctgggtttgatgacaatcaaattgctctgaattttgttgttaggatgaaatctgctggagtagtttttgacgcattcacttattccactgctcttagcttctgtgtgggctctgaaggatttcttttaggattgcagttgcagtcaactgtggtgaaaaccggactggagtctgatcttgtcgttggaaactcgtttattacaatgtattcgcggtctggaagtttcagaggagctcggagagtttttgatgaaatgtcgtttaaggatatgatttcatggaactctttattgtcaggactttctcaagaaggcactttcgggtttgaagcagtggttatctttagggacatgatgcgagaaggtgtggagcttgatcacgtgtcttttactagcgtgattactacctgttgtcacgaaactgacttgaagctggccaggcaaattcatggtttgtgcataaaaagaggttatgaatcacttttagaagttggtaatattttgatgtcaaggtactccaagtgtggggttttggaagctgtgaaatcagtgtttcaccaaatgagtgagcggaatgttgtctcttggacaacaatgatttcctcgaataaagacgatgctgtgtccatcttccttaatatgcggtttgatggagtttaccctaacgaggtcacttttgttggattaatcaatgccgtgaagtgcaatgagcaaatcaaagaagggcttaaaattcatgggctatgcatcaagacaggctttgtttcagaaccatctgtaggcaacagtttcatcacattgtatgccaagtttgaggctctggaagatgccaagaaggcttttgaggatataactttccgggagattatatcctggaatgctatgatatctggatttgcacaaaatggattctctcatgaagctctcaagatgttcttatccgcagcagcagaaacaatgccgaatgaatacactttcggaagtgtcttgaatgcaatagcttttgcagaggatatatctgtaaagcaaggtcagcgttgccatgctcatttactgaaattgggtttgaatagttgtcctgttgtttcaagcgcgcttcttgatatgtacgccaagcgtgggaacattgatgaatctgagaaagtctttaacgagatgtctcaaaagaaccaatttgtttggacatcgataatatcagcctattcaagccacggtgattttgaaaccgtgatgaacttgttccacaagatgattaaagaaaacgtagcaccagacctagtcacttttctctctgtgttaacagcttgtaatagaaaaggaatggtagacaagggctatgagattttcaacatgatgatcgaagtctacaatcttgagccgtctcatgagcattactcatgtatggttgatatgcttggccgagctgggagattgaaagaagcagaagagcttatgagtgaggttcctggaggaccaggagagtcgatgcttcagagcatgctcgggtcttgtaggctgcacgggaatgtgaaaatgggagcaaaagtggctgagcttgcaatggaaatgaaaccggaactgtcaggttcttacgttcagatgtataacatctatgcagagaaagaagagtgggataaagctgcagagatcaggaaagcaatgaggaagaaaaacgtaagtaaagaagctggattcagttggatcgatgttggtgacactgaagggtctttaacgatgcaaggtttctcttcaggggataagtctcatccaaaatctgatgagatttatagaatggtggaaattattggattggagatgaatttggaggggaaagttgcagtttaggactcttactcaaagttctaaagagttgtagttatagatcaaaaattagaaatgttagctatagatttacatgaactcactgagtgtatgattacttttatttttgcacctacatacgtgcacattgattttgtaaggaccatggtaaaccggtaaagcatggttctctgattttgaccttattgaccggttcgattgattaatccaacgctacgatcaaaatagacgactctaacttttctaggtcaaccgtaaaatatatatactttaatttctacaaatagtatcttgaaactattaaactatttattaggttcgaatttggttggtattattcccaatccaaaggctaaaatcaaaaaaaaaaaaaaaagtcaaaataacaatggattttaactacaaaaagtttcaagtttatgggccatttcaagtttgaaacttttgttgttttttctatctaacgaactcaaaaagagaatatgatggctttaaggtatgagtttggtgttgtactcttactcacgtctctttacatttatcattgtataacaaaataagattttaatagtaactttgaaatgattcttaagcaacttaaaaagcgagagaagagaatgtttacgtcgtcgataacctcataatgcggattattcttcctaacacgttaccctctacgtaccccacttgataagccagtttacactttcccttccaatttactttttctaataaaatacttttgtcttccgtcgtcaaacaaacaaatgtatgacttaataagttctatcaaaatgaacgttcatatactcagctgattataattgacgcaacttaaaaaaaacagaatgaagactcatatattgtaacatggcttgtatcaactataaataatatttgtctagaataaagactccgatggtggttgaaacttcaaactaaaccacccaggacacagcttaacgtatcattataaattaaagataggatagtaccatactagttagtaatttgactatttattaactacacaaatttttaacagatttagaacttgagtgttatacatattgaaagtacctgtaacttgattttatcaaatcagattttaagtacttattaaaggctgaagcatatgaaaatataaatcaatttatatatgacttgttgaagcttttaaattaaggagcgtatcaaaaaacttaaaacacacaattaacgcgcgtgtccacgctctaagcaaagcgagtgaaacatattaatttacacaatcgaaccgtcattaatgttatgggttgtctcctatttctggtttaaaagagatattaacttaaatcccacgtcaccaaatattaaaaataaaataaaaataaacaaattatataaatttcttaacgcacaatttgttgttttccataattccatttacccgaaaccctaatccccaatttctctttcaagttttcgatcacgatctctggaaaattaagagagaaattcaaaaacttcgggagttcaaagtctcattcagacattccagaaggtgatctcttgtttcagtttttctccctttttgttgattgtttcaatattggtgttttatccttcgatctctatgaaagttgtttcaattggatcgagattcttcgctgtttattgattttacgatacccttttcaatcgtttggaagtttttttggtttgtcctaattcgaattattcttgctgtctgaagaatctgtttggaagtaaatttggattaatcttgcttagcttgtatctcctgtgattgatcgcgattacgttggttcttctttctgtttacgcataattttactgattcatctaaattttgttgcggctttcttatgatctgtgttccagagtttgtggattattacatcaaactatatgtttttagagttgtttgttttattaagaatgtatgatcttctgctttggatgtttgctcacatatggatatttctcttttgcaggtattctagtcgactgagtaaacaatcatgagaatcagaaaaggaagtagagttgaggtatttagcaacaaagaggcgccttatggtgcgtggcgatgtgctgagattgtctcgggtaatggacatacctacaatgttagattttactctttccaaattgaacacgaggaggcagttatggagaaagttccaaggaagataattaggccttgtcctccacttgtggatgttgagagatgggatactggtgaattggtggaagttcttgataatttttcctggaaagctgccacagttcgagaggagttatctggacattactatgtggttcgcttacttgggactccagaagaactcacatttcacaaagttaacctcagggcccgaaagtcgtggcaagatgagagatgggttgcaattggaaaggtaatttattttcatcctatatgttatgctctcactttttacatctaatatactcttgttaatgtctttttttcttttcttttctccattaagatttccggcttagtcatgatgtcccctcttccatttctaagaagttctgggtctggttgggggtggcaatctgcattgtcttgctacgatattgtttgtttgaaatgattttttaactaatgtgctgatgagcttacatgttgactaactggcttgtaatcattttctcagatatctggttctctgaagtcatccacactgactggatcagacgtacatcagaagctacagccccacaggaacagcatgcctctccacgagcctagcgtggtctctgctagattgttaaagaggccgtcaccttacaactggtctgaatgtgctgaatcatgtacaggaaaccctaagaagatgcgttcattggaaaaagaaggacagcagcaaaaggtagatgccatttcttgccgaccagaaaacaggggtggtaaatctcacgtgcaagcttccttaaacaatcacaaaactggttactgtcaaattgtcagggtaagatcaaaagggtttagtgagagtgttcgtgctgatgattgttctgatagcgatgtatgctcagttggtagttgtagtgctactagttatgatgagagtaacatgccaccttgtatgctagatggctctactcaacaggcagactcatgtagcagcgatgctgaatcttcttgtggcctgggggaagaaccaaggtggaaacattcatcagttggtgatggagcaagaaattcttgtaggtcggaactatattcttaccgcagtactctgggggaattattttcttctggtcccctaagttgggagcaagaagcatcattaactgatcttcgtctttctcttaatatatcagatgatgaacatttgatggaggtaagaaatttgatatctactggtacccgcagtcaattttgttagtatcaatcagaattcaaatttttctttttgatttctatggtcaagtctgatctacctgtcttggatatactttcctgaaatgtggaatcaactgtcatatattgttctttttccagtggattttataagtgtatagacagcagatacaagtatgtatggaaattctgattagaatgaaagtttccgaggttcttttctattgctttatcagatttcccttagattcctttattgtaattcctggaggatgttaaagcaaaattcatgtatcgatactctgagatgtcatattttgaagggctgtcttctgttcattaaatctgtaatatcaattttatagcacgattttctgttcctcgtttcgtgttaactttccacacttgtgtgttgatatacttgataacaagatgggtcaatcgtattttcctatgtggattttacttcagtgcaatatgaagtctgaatgtctcatctattgagtgctccttcctgtagctctatgaaatgtgttagtgtgagtttcctagtcattcctctgaacaatattgatttccccctgcatttttcaggaacaatgttgccttatccgggcatgcagaccttttgcttctagaggtctaactctgatgctggggtttacaccttctcccttgaccatctgagtggtgcaataccatacctgttctccctcaaaacataactgacttctatgccatttttattttgtcgctatcttgatattgcggcttgtttcaggggcttctttcaggtgtcctggagtctactttgtccacagggactgaatgctgtggtttgagcaggcttccttatttgcagtctggttggataattttgctgacatcatgtcaagttctgagtaatatttctttacactttttcgttcactcgatatatgttgcggtgctatcttttgtggtgttgtgtctcctctggttgctttcttagaagtgcatgatgtagatgctaccatatttttactattactagctctctaagcctaatacgtttagatgtagaacacaacgttgtttcagttacattggttctattttcggtgttttttccagacgcatagcctattgatgcttattctttctggaaataagtgttgtggcctactgagaggtaagtgtgcaatggcatgaatggggttaatgtaatagatgctcatccagaaaatgtgtttgtgatcggtgttgattcgttattctgatttgttctcatgacttactttcatggaaaattatcgagatgaacgggaacacatgcctgctttcttacttagtttgtcgcatgtgcattgtgatcggagattgtccaagctcactcttcagatgtctccagcaaaggtaggttgtttgcatggcagtatgaaactctgaagcagaatccattaattttcacaaaggtatggatccttttgaaagatgtgtcgtggttcttcaaagtttaacatgtttttcttgagtagtttgcttgcttatagaatcaaaacgagtttcgtatcttcaaccagactttctttggcaattagttactactgctacttatgcaatgcaacctctggcaatattgattgatttgcgttatgttttaatggttatgaaaactgactcttcgatataagaacttgtgaagtaaaaactctatgtgatgaaattatgaatgctgaggatgttgttattacgagcaatgagatgtctttttttaaaaaaaaaaatttggttgcttgcttgcaagaggacatcttagcatcaaatttgaaaccgaaagctgactcaattctggtaactactggcagtaacaagaaaacaagtcatgaacctgcaatttcattctaattctacacaagatgcaaatctcaacttaaattcacttttaaaacttgttattattgtaaattttttgaataatacagttggaagtaaaaatccaccgtaccagtgtaccggtaacgtggaagtataaaccaattcgccaatctctttcttcctatcacaatttaaagacagcgacaaaattagacggttagaatgctgagttataccgggttattaagataacctttgttttcgttaaccgaacaaacgcgactgagtttcactgggaaaaaaaaaaaaagaagaagcttctttagcttttgtgacgaataggagggaactgagttttaggttcgtcttgatacggcttactctgtgaatcgagaagaaattgaattcgtttttttcgtctttctctgcaaattaacccatttgactgtttgtagtttctttcgcagatttataaagttggtcttcttctcttctaatcggatcgattctgcttccggttaaccggttttgttccccggcgacaatcagcaatctcctccccggccaatgatatacacgttgacgagaggttcgcttctcggctctacctgtaagctacgctactcttctttattttcttatctgagcacagctgcgctgagattgggttttgaaaaccctactaatggaaatccgatggataattcttcgcatcacattggttatgtaaatgggtttaacggtggagaacaatcgcttggtgggtttcagcagaattcatatgagcagagcttaaaccctgtttctgggcagaatccgacgaataggttttatcaaaacggatacaatcggaatcagagttatggggaacatagtgaaattattaatcagagaaatcaaaattggcaaagtagtgatggttgttcctcgtatggaactactggaaatggagttccacaagagaataatactggtgggaatcattttcagcaagatcatagtggtcatagctcgttggacgaattggattcgatttgcagagaagggaaggttaaaaaagctgttgaaattattaaatcatggagaaatgagggttatgttgtggatttacctagactgttttggatagcacagctttgtggagatgcacaagctttacaagaagccaaagttgttcatgagtttattacttcttcggttgggatttcagatatcagcgcttacaactcgataatcgaaatgtactctggttgtggttctgtggaagatgcattaaccgttttcaatagtatgcctgagagaaacttggagacttggtgtggtgttataaggtgttttgcaaagaatgggcaaggggaagacgccattgatacgttctctcggtttaaacaagaaggaaacaaacctgatggtgaaatgtttaaagagatcttctttgcgtgtggtgttcttggtgacatgaacgagggactgttgcactttgagtccatgtacaaagagtatggaattatcccttgtatggaacattacgtgagcctcgttaaaatgttggcggagcctggttatttagatgaagccttgagatttgttgaatcgatggaaccaaatgtagatttgtgggaaaccctgatgaatctatcacgggttcatggggatttaattcttggcgaccggtgtcaagatatggttgagcagcttgatgcaagtagactgaacaaagagtcaaaggcgggtcttgtacctgtgaaatcatcagacctagtaaaagagaaattacaaagaatggccaaagggccaaattatgggattcgatatatggcagctggagatatttctcgtccagaaaacagagagttgtatatggcattgaagagtttaaaggagcatatgatagaaattggttatgtacctctatctaaacttgcattgcacgacgtggaccaagagagcaaagacgaaaaccttttcaatcataatgagagattcgctttcatctcgacatttcttgacactcctgcgcgttcgttaatacgagtaatgaaaaatctacgtgtatgcgcagattgccataacgcattgaagttgatgtcaaagatagttgggagagagttgatttcgcgagatgcaaagaggtttcaccatatgaaagatggtgtttgctcctgtagagagtattggtaacgtctttccacacagagaggaggagcaaacacacatttaaggattacaatggaaacatggttttagtgttcatttttttttgcaggatgttttgtatttgtccactcagtgaggaagaaacattcttaaatcacaagatcataaaatttcacggttcgatatgattgaccagagtaatttcttttttctttgtcaaataacattaagctttaaaacaacaacaaaaacagtgggccactgggcctaaaagcccaatttctcactagacgcgagaaacccacagtgactgtcatcattcattgtcccgtgaatcaactcgtcgccgcaagctcacggcctccgagcactgagaagcttaacgtcgtcgatcaccggtccacataagctcgagaaatcgtcgtttctcatcgcgtaaaacgtactgtagaacataactctagtccgactcgagacagcgacgaatctcaatgacgatcgcttgaatcctcctttccctttcgattcatacgggaccttgatcgtgtcttttccggcgaaagcttcgacgatcattgatccggcgcaagcgttgctagcatctccgacagagaaggataggacgtaggtttttccagggatagtgcggacaacttgtgcgacggcgctttctttcccggcgacgagttcgacggcgcgacggccttgaggaacggagaaatgatcggaatctatgtatttgacagctttaagagactcgaccatccaaccaggtaacggagagtgatcgtcgatggagtttggtggaatcaaaacaccagatgatatgtttggtaaaacccaaggaccttcttcgaatcctccgttctttagaatgttctctgcaaaacaaaaataaacccaacatgttttagatatttccgtatttgccccattaagaatatttttattcaaacgagaccccaaattaagtataagaaaagagcactcactattggtgggacgaggagggaaaagggctcgcatagcaacaccatcaatgagaggtccacaagcaggatcttcctcaacacctggattatgtatcactatatctgcatagtcactttgggccttaaaagcccacgaatacaaatcccaacctgagctactatacactgtttgtatcggcatcactgcatggtgaggagccacggaaacgtttaaccgctcgtcttgtgcgcatgttcgagcagcactgaacgttatcgaatagtacgaccctttcttaacgctgattttttgtttgattgaggcttcgttgcctagacgtactgcgaatgcgcctttaggcacgacaaggatcatgtcgccttgtttgtgtcctgagggaatgtactcgacaaagcctgagagttcccagtttgggattgctgttatgttgataacttgtgttcctttcatgtccgaatgtcgtggaccgagttcgaagtcaccgtttggtagtagtcctgttttgttttgttaatgtaatcaagttacaaaaacaaaactagttagggatttgttgtgaaatttgatttaaacgatagtgatttgctgacaataatatttgaacttcaactgcatctagtcacctaaaattgacagtgattctaggtaaacaaattctcaatcttgctattttagatctgtatatgaataaacaagtgatcagtgtataataattgaataaaaagttggaagtatgaaatatttaaatgattaaaaaggttagttacagatgggaaggtgagggtaatttagtgacacatttattgaaaacgattgactaaacaccatgtgcatttacagatctgtctcggcgtagtgttcaacatgttcgtcaagctaataggtcattcttcatgatttgtggtgcaatataaatgaattattttgacgacaaacaaaattttggacacacaagttataagaagctgtacaaatttttataacacgaatttcttaaatactagaatattgttggaactcactacgagtttcttttgttggtttggctagtatatagacaagatacgaaaatgcgagatttctacggaaaagataaagaacgagggatttaccatcattgaagcaaaaggcaacgtagaagaacgagtgaaggagaagaagcactatcactcccatctctttcatttctttcgaatttttctaccccaaattgatatgttgtataaaattttaaactttcaaaaaataaaataaggattggagaagagtgagcgagagaaggaatgtttagtgggagtggaatagaacgaggaggagagagagctcttatatgcaaaattgtgcaagaaaggcccctttcctttgtctaaattatgactttgccactagtgacttatgtcggaacaacattggtccggtttttttattcatcgttccttggaaatgggtcactttttcttagaaggtttgactaaataacactgtcgatttttggtttggttgaataaattcgcaaattgcctatattccatggtaattctagtgttaagtcgtgattccatcatctattcgttttttaagcgtcgtctagattgtattcatttaactttgagtaacgatacctaatgtcataattgttgcataaaaagcactgatattcgtattttcactacgagatatctttctttttgttagattaccgaaaatagattaaagatgaacaactacgatatgtatattacgatttggaaaacgataactatgtgattaattaatggtaatataattgcgggggtgaagaggacaaaagctgtgggacaatgtggtctctcacatgcctatttcacattggttctcgcatcgccacaagttaaagttgcttatgttccgagttatcctatcacaaacacataacgaataatataaatattatttattatcagaaaacaattccgaatcaaccaaacagttgcttcgaaagcttggtctgtgtgccaaatccatagcaaggtatatgggctcaagtttttttcatgggtttgatcggtaactttcagtcacatttgtaacttagtcgttgtaagaaagaccaatcaagcaaattgttttagcggtctattcaatcaaaggggtttgataaaatgagaaaaagtgttgatcgaatcattatttaaattttcgaaaaataactcttacaatattcttacgagaaaaatataggtttttagacaaataacaagaccaaaaaatataatttcatatactgttagaatcgttaaacgcatcacacatgccccaacaatcccaagtgtgaagtataaattataaaaccatgcggactctttgtttacttcaatagtttaaagtttaaacaaataatggtccgacttcgatctaaattaatttaactagtctttttccaacttttatcatcatgtgctttcttagatttagtctgcacctttgtcgggaaataatcatcgatattcttaaaccaaactaaaaaaaccatagatgaacatgaccaacataatcacaaactatctaagcatattgggacttttttgaaatattacaataaaataactaaccaaccattactatataaattaaacgatgaaacataattggcttttttacattatagtatacttatagtcttagatataaatgtggtcggacttttagcataatgtgaataaatgcatgtatcaattacagaaaattttctcgagtgtcaaaattaatttctatagaagactatgtcaaattgtatggaaaaaaggagagtatgagaaaattaaacataaatagacaataaaatactttgtaaaggattgttatccttcgctcgtcgtcaatcgtaaatctgatccatgaacatatataatttaatgtagagcaatatatgatatttaaaatttaaagaataatcgaattttgtctctgcagcgtcagaattgatggatcactgcaaatgccaccgactctcttagcggtgcttttattgcacaaattattgtactaaaaaacatattgcgtgtgcttataaatacatacacatgcattgtataagtataaattgtgtatcaaataatgcattatttatctctaacatgcaattgttgctaatatgttattttttgttttgacaattgtatctaaaatgttccattaagcagcttccatgtctaatatgtgtgtctagagttaatggccaagtggtcaattctcccatgcatgtcaccactaccagtatatctagaatgaaagtggtctaaaatactaagaagaaattaattgtttttttggataaaatttggaaaaggaaaaatattagtaaacacaaaatgtttataggtgtcatgtatgagttaagtagtctgaataaagttaggttcagttaaaagattttaattgtatgaagatggacgtataactctgtgtgttttgacttggtggttaaacctaaatttatgattttcggccataaaaccggggccacacagccatgtaactttggcttgatgttaaccctggatccacattactattaaaaagatttagccatacatgcatgggaaagtggaccactaaacgacatttgactatatatcgtctttcttgatttgcaaaattactaatgtttagtttagtagaattcaaatctgtagccaaactatttaatgtaacttatgaaatcacaaccttgacttgtggtgccaacgggcaacggcaatgtcatatacatcatagttgttttagattatttttatatatgtttaaaacatcaactatttattatactacaattatttaactacctatcaagtttgagagccaattgttataaattacaatctcacatctgttattcagaactaattaatttacttgtatgggaaatttatttatatggtaacaaaaagaaagaaaattgtaaatagtttactcaggaaagagtagagagaatgttgatagaaaaagagtgatgataagaaattgtttgcatgggagcgaaataacggagaagacatagaagaaaaggacaagacagccccaaaaagatcaagacttgcgtcttggggaatgcagattaacactgactgctgcctttgtgtatgaatggaggagacacgcgatcatctttttctccactgctcctttgcgagaacgatatggactcttgccttgcaacgtctgcacttgtccccacaagtctttggtgaatggcaggatctaatactttggtctagctagggtaaagaatcgtgcttctccgcagacccttcgattgctgcttgtccatgccctggtttacagtgtttggcgacaaaggaacaacctcatccataacaacatcgtagtgatgccgcttacaatcttcaaggaagtagaccggcttatcaaaaactccattactgttaggcggaagcgaaagaagttcaagaatcttatgtcactttggctcagctaaagaatcctaatctttatttcttttctctgagattgtgtagaatccaaatgattccttgttttttttattcttttttgccaaggaacacttactctaggtcttattgtaacacctaaaccttcattataactttcttagcaaaaacaaaagacagccccccaaaaaaaaaagtaaatatccaaaacatacaccaatcttaaaaccaataatatgaaactaagactgaccctttttatatgtcacatctgtctctgtcagtaatgagtatccaccttgtgtacaaccttaatttttacttccatggaccattcaagatcgcatgtttttgtctacaacacatcttcttactttcgtagtttatctattgattctccatttggttgccacaatgttcatagtttcatatgatggtttgtaaagccctcaaaactagcctagaagtcgaaccaaaaacatcattttagggaatatacttgaatttgtgtcgagtcttaactcatctaatcttcttgttaccatctcatctctaaattcaaatccatatttctaacatttgtggttggctaaacgaaagtgagcaaaagaaaaggatgagagagagaggggacagagaggaagatgggtaactaaaagaatagatctggcctgaatctattaaaggcttgagtttcagtctacacactcacatgcaaatgctcttttctggatatgaaatatttatatacataacatgggtctctctatcttatgaatgaatgattttacaccctgtccgataagttataataagttagtttttgaaatccaagtttcatttccccgatatgcccaaaggatctctttccatcttcttacacttgccggtttatctcctccacaagtagattttttgtgtattcgtcgattatgtttgaactcaacgtaagaattttcggttgccaaggccgatcatataataatagtacggatgattccttcctatctttttaactcagtgaactaagagacaaaaagaaaacacacacccatagtcccataccatagacttggacagttcaacgactggctttatcggtgcctaataaactcataattctctcccattaatttctcacatgaaactgtcaatgcaaaggatacatcaacatggctcgaccaaattcccaagaatatggaatcatggcacttctacatttcaatgcataaaacttaaacgattctgagagaccaattataagaataaaagagcaaaccagacctcgaaaatgataaatcatcgagacagacttgagttgcgtcgtcgattttattcaagccagcaaaagcgataaaaatgtaactagcaacatatccacttaggaaaactatcacagatttatgctttttcaaatagtaaatagctctgttcagaaagtgagcaccaaaatatcaatgttgcagatttatgcagagaagcagcgttgaccacaagaaaaggggaaaggaatgcttatgggagtgtgcgctggtatagtggtagagctcccaaggcctctcgttccttgctttccctctcaacctgcaaatcacaacataaagacagggatgatgacaacgatgatgggctatccttacagaaaagttacactcagaacttttcaaacattgcaaacattttctttatgatgcaatacttcatgaaatagggaaattgaagatctgaaaaaaacatattgcttcaaataacgaaggaaaagacatgcatctcatcaaagttttcatcattgtcaatgcagggaagcagataggcccaaaagaaagaggaaactttacttcaagaaggaatagtacgcttttatgacactgaattgcagtttgattgttcctaccctagacgcagataatgatttctatgttagttcatcaaaaaggagacttacaagagcaagcatgtcctgaagatagccacggaatggggtctgcaccgcctgtatatgaaataaccacatcaaataagaaagttacaatatccacaacactacctaacagttgcaatttctgatagcttaatcaattttggaaaactaaaagagccttatacttttaaagttgtgaacttttgatagcttaattaagccagcaataataacagttacattcttatctaataacaacatcaaataagaaagtaacaaaaatcgaaaagtctaaaccatagagtaatacaatagtatacatgcaaacaccactttactttattgaaagggaaaaaaaaagatgtaacaaggattcaacctttcatcaatccaaaatttccaataatctcaagcaacagcagaacaaacacagtaacgcaagagacaagcatagactatgcataaactagtttatatacatctaagctccacaatcacaaaatccccaaagtaaagtaatatcttctgatgaactagtttcgatttcaatttgatatcttaatttcttcatttttctagcatttaatcaatattcgagctcaaatgcctgggttacctatccatattctagattgattctaacaacatcaatttcatccaaagaaatagagaatgaagaattatacctgaagatccttggggaggtactcgtgcttcatggagaggtccatggcacgcttgagacgctggttacgagcatcaacgacctccctgggcaatctgttcatagcctctttgatgtccatactgtaatactgatcgtacagatcatcgtacctcagacctaattaatcattcaaaccaaacaaaacaaagcagattcagattcactcatgaacattgacaacaaactcggatttcagaaattagggttatggatcgagagagatctgaccgtatctgcgaaggcgagtagatatggctttcatatgcatacgagcgaggaagttcttctttggatcgatgaatgctttcagaagcgacgccatttttctctgtctctctcaatttcagattttctctctttgtgccaatgaaagagaccaagctgctgtgtctacaacaactcctgacctgagagaggaaataatcacataagctctgcttcacgtatttatttgggccttaagtggcccatctaagcttcacgtatttttgacatatataggtcacgtactcacgtagtaatatttgggccttaagtcgctcagctgtagcgtcatttaaggcccagtgataacttgtatttagattataaactaacttgtcttaataattcacaagaagcaccagtggtctagtggtagaatagtaccctgccacggtacagacccgggttcgattcccggctggtgcaaatttttagtgacccttttgtttcgtgtttcacaaatacatgcatttaactcttattcgatcctacttaaaaaaaaaaaatgggggaaatttaagttgtaaaatccactaaactcatgtgaatgttatgtataggcaaagctagttgtatgaatggtaactagattaatcacaaaattgatataccagttgtgaaaaaagagggtttaatttaatagctggaatgagaaatgataatcttgttatatagatgaggtaagttaaacaattataattgtatcttcattctttactctagacgaattggattccggctaacaccactacttgagagttgaaaggcatgtttttgtctgcttatgattaaattaacttaaaaagtgattaagtatcgtctcaagttgcaagtgtaatttaaggttaaaatgttgtgactttaacaaaaatactctcaaatcttgtgttcccactttcttagcaaagcattttaaacagtttcttgtcaatatctaaactaactttaattaaggttaggttaaagagataatcatgcatgtagtaggtacttgatttagtttgatatatttttagtttggtgggatttttgatcacgacccatatcctaattgctattttttagccacgaagtcgtcgtcatcatccttatcgtaaaatatgaagtaggcctaaagttcagtcccatttagcttcatgagttcataatttttgttttccaaataattgtgttccgataataacgcacaactatgaattgtaaaagtttgttttgtttgtttcaaaagacaaccatatataactcgtctgactgagtggttaatgcatgtgggcatgtatagtgactatatgagcttgtctcaatatttgatgttttgaacagtataaaccggttttagcttagcacataatactctctctgctaagctcacgttaatttaattagatatatatttatcaaatcacataaaattatattgtatggcagaattattcaagcaaatgcgtatataagttataaaatttggagtgatgaactgatgattaactttactggactgaaatgttttaaaaattgtgtagacttggtctttcttttacacaaaatgttataattcgctgataaacagctttcatagcacatggttttggcctcaatggcagttaattattcagtaactaattaatatcacgtttgccttctttttaattggccctttttggccgtctcaattttttttttaaaatggaaattatagtttagtttaaattttgtactgtcacaaattgttgtcatattgatagtagttatctttatttaagatttgatttttacacttttacacaacattccaatatttcataagtgtttgatagtgaggtccatatatattacactgaaaagttgtatttaatttatatgatgaatgcaaattgccttaatttattagataaacaacactttgtagatcattaagaaatggaactttagtagcactttaattgtttttgcttggacattagattgattgtgaactttgatttgattattgttgctttataaaaacacaataaagtgtctacagatagatatttaggatacaatgttttagattcttatttttaggatgggaatatcccatcagtctaaatgctgggagacaaacgaatttatgaaaaaaaagtattccatattgattccttcttatcccactcttcttcctgaataaagctcttaaattcaagaactaaatgtttaaaaactacataaataatgtggaattctctgctattcctaggcgaaatgtggtgtttgtttataattttcctttgctatccccaaagcttctaaagaccctatcatttcaattttcttgtcaaaatcacaattgatcaatacaagaaattgtagtatcttaatttggtcaagtgttctaacatatctgtaatcagaacgatccttttcaaaagttttgataaattaacgtttatgtattattcaatttcaactgcttgtcttttatcaaaaaaaaaaaacatatacatgttaaaaatagtaagattataactaatctttccattaacatttctttctttttgactcttcggatgctcttctagccaggctctagccctctctaataatataactgatgactgtcacaatataattgatcatacatttgaattagagaaatataccgattagcagcatgatatttaaccaaatctgttggagtaagttgaatatgactcagcagttagcctaaaagtttttaagatatatacaacaataattaaaggcgaaaagggtgatataaaatatagctgaacagagtttaacatatcttatactgggaaaatcatgtgtataattatatatacaaacgtatggaaacttgtcgaatgagtccgtcttctaaaaaaaacaaatctcctgcaattaaagatgggttttcactattgtaactgtcgtagagaaagaaaaataattgatggtattgttgtctacaacaagttttttttttttttttgttgttgttgttgtctacaacaacaaactctatttaattcagttttaaacttttttttcaaataatttttgttttcttctgtccgttaattgataaactttaatttatgtaaataaattagttgaaactttaattttttttgtagtatatattttccattgccatcaaaattctgtagtgtatattagcgcgaaagatgagcattatatatcagattggttagttaacgtgtccaatatgcactccactaaggcactaatttagtttgtaattgatgtatcaagaacattttttaaaaaaaagatcaagaacattataatagcatatccttgccacaaacatatatgggtacatggacagctttgaacagcactgacctaatttaattacacacaaatttatttgactctcatactaattaccaaacgtcgatttctgaaataaatcatttaaatttcaaatcttaattttatttcgtttttgttaaccaaatagtataacaagtacagtatcaaaagtttcaagtttccttagaatgacctaatcactattcgatgtaccaacgtatctactaaacataatatgcatgcaatggcattattgcattttttgcacattttacaatttctttctgttagtgactaacaaaatggtgtaactgtttagtatttacctcatctcaatgatgatctggtccacatgctgccaccatgtgacccttactccagaatattcccagtctccaaaatccttcgtggagaaaatgcggaatattctactaaaccgaatcctttcattttattttattttttcctactcttttctgattatatttaagatccgatcaacttttcatatgggcgatcgagaaaacatctatttaatttgtagaactgtaaaagtgatataaaacccatgcatgtgtccatggtttgatagacatctgaatatatatcgaaaatgtgatataattctataaccacatttgccaatccttcttaccaaactaaaactaaaagtatgtataccatttcattttgttgtaatttttggtatctgaaaactgattatatttttttaacaaaccgataaactgataccgttaatatttatattagagcaattttttttcaaaatataatcagatcgaatcaattgaaataaggaagatcatattttccggcatattttcttaaaataagttctaactttcagctaatttcctccgatccaatagttgttttggtggcaggacaaggagtccccgagtacgcacgagccgggataaggcgtttaggacaaaagagacacgtgtatggctatcttccacgtagatgtctttgtccgcgtctaattattggcacgtgggtcctagtatccaagatcaggacgattctagcgagtcgcaagtgcttttcatgattaatcatattattatataccttttttcatgatcaatacgcatcttctttaacgaaaattaaataaaaacaagcaacagaaaaagtttcttaatcctgtggacgatcgattcaaccatacaaaataaattctatgtcaaggaacataaacatttttttttttgcatgaaaccggttaaatcatcaagaaaaatatgagaacttgtttcttaaatggtatataccgtccttgagtttcatttaaattttttgtgatggatattgtaaaaagtagtttgtaagcttgctaataatgcatccaaaaaggatatgtgacatgattaacaaaatttgatacaattgatttgtgataatgaaaacaaaaatacaactaaaagctccataaaccttgccttaagataatgacaacgaaaataaaagctagtttactgtctcggttgattggttgatcccaagttctcctttatcttagagcaaccataccactagacaaacgagaattaatttttttactaaaaatggttcaaaaaaggtttatttagtggctctaattgtttcgttaatctaaactatacacgctttatctagttttcagataatcttatttcaaattaagaattaagaaaatagtatagagataaatctaattgttaaaaatggattatagtacatactaattatttgttaaaaaaaaagcatcgagtatatccgaatctgtggtccgaagttgggacaagctgacataagatctagctgtctttagccatcagatccgacttagttcccaatcatatactgacacgtcatcttcttccaaactcaaaacagagcatcgaagcactctttcgcggcgccttgtatctgttttttctcccacctctcaggcgggtccctaaccccttatccgggtcttacttaagccttcaatttttctgactatatatatcccttccacttatttctattttcttcatcgaaacaaaaaataattaagagagaaaaaaacaaaaaacattttccatctctctctctctctctctcgcctgcttcaagaaatggatcggcaaagttccgatgacatcatgaaatttctcgacggcatggctagctccgacgatgttctttttggcttcctcgacgaaggaaaccactcaccggaggattataacttcgccgccggcgacgaatccgaagttgacaacgataccaccgattgtaattcagaagagaacagaaaattttggcaagaacacgaacaacttctccaggtatatttttatttttaactctaaagaaactattattctctttgttttctttgtggggtcttataagttaattttctttttggaccaaatcttgaaatgtgtaggcgacactgtataggacaagttcaattgagacaaagataagacaagcaactaaggaagcgttgaaagtagttagatcaaagggtttggtatgtgtctgccggagaccggttaccgacggttgtcgtagctgtttacgcggcgaagtatctagcctcctccgagaagctggctatgattgcgtcatttccaaatctaagtggagaagctctcatgagatccctgcaggtaataaatcaaacccaattttactcttatctttaaattcctagtattcttattttcctaattatggaaggtgatttgtgattcttttatggattagtattgtttatgaagattccgtatgaatttagacatgttttgaaactttcacgtatctttatcaataacattactaattaagaaaccacatcaacggaattatctatatattctatataaataaatagaataaatatatcttgaacgttttcgcccctaaaacaagttgtcattaactataattaacaatttgaattaaccatgacgtttacttatcaaatttaggtgagcatgaatacttggaggtcgtggacaaatcggtttcaaagaaaggcgagatccgggtggtgatcgaactatgttttagggcggagtttgagatggcgagaggcagtgaagagtacaagcgactcatcggaatgttaccggaagtgtatgtcgggaaaacggagaggctaaaatcattaataaagatattgtgcaccgcagcgaagaagtgtatgaaagacaagaagatgcacatgggtccttggagaaaacacaaatacatgcaggctaaatggtttggaacttgtgagagaaaatctgtgtcgccagtatccgaaactgaggagaatatgtttccggtggcaaagcagagggtttctatgttgaattatggtctttttggtgctggaataggccgtccgaccgttgtagcggttgtgtgaaacatctatatagacgtacgaatacgataagttaggaggaaataaagtgaaatgagtttcactttgaaattttgcatgatattgtctcagttagaattttgtgtgtccaaaacagggtaatttctgggactattatggaccatggtatacaaagcggtattttaatcaaaataaataaaaaaattctatggttagataaaatattgatgaattctccatgtgattattgttttaagtcaacaaacgcggttttgcaagaatcacttgacctttttgtctatttggcaagtgaacaaaacgtgaaaaaatcacataaataaacattggtcggtaggccagatgttcatgtaatggaccaatgctaacgtcaacattcatcatatcaatacacttatttatgtttgtcttgattttgatgagggagatctaccaaaataaaaggtgatactggtttttcaacacatcatacgataaaattttatgtataggcaaaagtgcagaaattgatgtcttctatcatatatgcgagttcttagtagctatgatgaaattttgtgtatggccaaaagtgcataaattgatgtattctatgatatatgcgagttcttagtagctttgtgtaaagagtgttcttcgtaatgatagtattacatagacgacgagttccaatactccaacaaaacttattagaaccggaataacaagagaaaaaaataataattataattcgcaataaagaaggtccaatcctcaaaagaattgtaaaaactaagatgatgatgatgatgatttttcaacgaatatcattatcgacccaagaattaatcatatggagaagttttgtatgagctatgtgaatactaccagtacgcattaccatgatcataaattcataattaaacacaaacaaggactaatacgagacgggagaaatatataaaggtacaacaaacataatagaaaggtacattaatattaaaactcaattgtggagaaactgatactctcacaaattatatgaccagagataaaccctaaaccatggaacttatcataatcacaagaaccaagcctagagaaatcactcccggagcaacggaaccggccaaattgcgaacagctgcggcgggccctggagccggcgcaagaacttctgaatgggagggatccactcccggagtaggcgctggcgatgacaaagccttatggaccggaataggcgctggcgataacaaagccttacggaccggagacgctgagggggaaggggaaggagagggatgacgaggagtgtggctgtggtgtccggtagacatgaccgttacggctagcttttgacctttgagacaggatccggagttgccgctgacgaagaagaatgggtctgagcggctaagtaggaagagagagtcaccgtctgagagggaagtcaaagggtgagtcgtgttgcatgtgttgtactctttttcactcacctccaacactgaatcttttcccttcacgtacttaaaatctagcaaaatcaacaattgatataatcatgcattaatgacacatatctgtggccaaatagaagagaagagagagacttacaaagagtgtcgttgacttgaaaccggtttcggtgagaccaatgagaataatcctcggaaggagtaaggacccaaccatctctcccaccaacatagaacttgtgcccatttgataactctatactaaaccccaaacccatcaacatcacaatcatcaagtaaacatcagtcattttgacaaaaaccatcaatatccgaaccaaaactttaattaacaccaactttctactctcttatagcttaactctcattaatttggtgtggtttgggtgcttgcttgtatgtgtatttatggtgaaagtagacaagagatttatagccgttgggtgaagcgtttggctgtgcatcgatatgtagagaaaatgccaattaagtagaagcgtttcgttcttgctcatctctttcttttgttacacgtttcgacatgcaatagacttaacggctatctacacaatattactagtcaggtctttaactactcatcatcattcatcaagtacaacttaaaatttcattttttaaaattcaaactttaataacgtattgtcttattttacactattagcaggagatcagggatgacaattatgaattgtttttactttttagaggtattatgcaagttacatttcaaatatttaatagtcagtagttagtcaccaaaaggttaaatttgtgcataaaacatagcaaacataaagtgtatatgcaataaatgaaaagtttatcgtgattgtaatttttttttttttttaagattccgatatccaaaaatgttattctagcaacaaatggtttgactgagctactttagtaattcttcgtcaatagaattgaaattgatcgacaaatatacttattcgatcaagaaattcgaatatatcttatatttcaaagacatacttacgaaagaaacttttccatcactttttcataaaaaaatcgaatatatatcttatatcttaacgacatacttccgatccatagagatcgtcttattatatttttccttacaattcaacattttggtgattaagattttttactatacctaaaataagttttttaattacaattcaacattccttactataccttaccaccaaaatgttgaattgtaataataacactcttttaggtatagtaaggaatctttacaaaagaattcaacattctttgattttttcacaaaaattagtaccctttcgtaaccaaaatttcgagataaatttttgaaacttaactttaacaaaaaagatagttttgaaacttaaaacagcttatggtattttggaaacaaacccaataatttaggaaactttcataatatgaaactttacaattaaatgttgacccaaaacaaaatgactcgtcaaagatactatattacccctatagatattattattttttaactccatgcgtttagagttttcgtcaaacgaatctaatttcattaagaaatgtttgtggcttatagtaagaaatcggtatgaaaattgtattacgtggcgaataagattacaaggagggaaattagttgcagaaggggcaaaagcgtaaaattacatagaaaccagaaaggtcacacacacccaagtttatagagagcaaacgaacgaattctcgggaggagaccaacccatgtgtacacgctacttctctcaacaataacaaatcacacgcaccattaatacttcctcgacaacggaacgtgaacgcctttttttcactttcaaattcatcgatcggtatgggtattgagaagaggaagaagatggtgtggttttggccggagaagcacgagggtggagtgattaaggaggcggaggatgtggcggcggaacatatatcgagagaaggtacaatgagtcattacagttttagcaaaggtcttcttccgccgcttggagtcggagccaccgctcgctctagccgtcacattaagctccgctgcttcatcgtctctcctttcgatcctcgctacaggtacgatgatttttccgttaactgattctctgttttggttcctctgtgtaaattgagattttctgattcataaatcgttgatgcatgtcgtgtggaactgatttcgcttctcttcttctgagatttctcgagagatttatcattgaagttaatagtgatatcaattctctccaaatctgtgaaactgttccgatatttccatgaatgtaaactggtcgatgtaatgcctgtgtggaagagacactaattctgtgatctcttagtttagctattcaattgaaccgtgtaggtttccttatgcattaaactttagtgtaaattctgcaaagagcttttgtgttctttctctctttctcctcatacatcagttacattatcactaagtccatcagttacattgtatgtaattctgtctatgatagtatcactgatgatgagttgcattatgttgatttttttttcagagcttgggattggtttctagtgattttggtgctatacacagcgtgggcatctccttttgagttcgggttcctacaaacaccaagagcacctctcagtattcttgataacgtggtgaatggatttttcgctgtcgacattgttctgacattctttgttgccttcttggacaaggcaacttatctcctagtcgatgatcccaagagaatagcttggagatatacttcgacttggctgatttttgatgtggtatctacagttccttatgaactttttggcagcttattgcataacactattcaaggatatggaattttcagtatgttgcgtttatggcgtctgcacagggtcagtaaatgttttgccaggtgagatttgaatgtgtatcattacccattattatatatgtgtacaaatttctggaatgcggttacttgaaaacctctgtatttcttagtttccctgtgttgaaattttcagattggagaaagatcgaaaatacaactacttctggattcgatgcacgaagcttctcctcgttagtaactatctgtacacgatcttacattaagcaattatattttttagttgtcattttaagacattgatggtcgctttgtaggtttctctctttgtggttcattgtggcgcctgcttctgctattctattgctgcacattatccagacccttcaatgacatttatggcacttgcggaggcaaactggaaacagaaatctttgcttatccggtatgttacagcaatgtattggtccataacaaccttctccacaacgggttatggtgatatacatggtaataatgcagaagagagggccttcattctcttctacatgatctttaatcttggattgctagcttatataattggtaacatgacaaacttggtggttcacgtgaccagtcgcaccagaaactttgtaagttctgatcattgtttgattaatttactaacttttcgtttcatatgacaatttagacacattatctaagaacaggcgatatgttcaatgcgttttggttattagctaactattgttttgttttgattcataaagttcattttcgttatttcagagagataccattcaagctgcctcagcgtttgctcagaggaacaatcttccactgggcttgcaagaacagatggtagctcatttgtctttgaggtacagaaccgattcagaaggcctgcagcagcaagaaattattgattccctccccaaggctattcgttccagcatatcgcattatctgttctacgaagttgttgacaaaacctacttattccatggaatatccaatgatcttcttttccagttggtaaatgtttctcattcactcttgtctaccttcttttgatggaaacacacagttaaccttctgatatcatgtaggtctctgagatgaaggcagagtattttcctcctaaagaagatgtgattttgcggaatgaagcaccgtcagacttttacataatggtcacaggagctgttgtaagttgctttggttacatcagctaaacaattctatttctcctagttcttttttcaaattagttgacatttctactatatgacaggacatcattgcgcgtgtgaatggagtggatcaggtaaaatccgcatttttatttctcttttgtgacggtttttaagttgtgagttgtgtattctttgcaggtagttggtgaagcacagaccggccatgtttttggtgaagttggggttctatgttacaggccacagttgttcacagttcgaaccaaacgattgagtcaattgcttcgtctgaaccgtacagcattcttaaatcttgttcaggcaaacgttggtgatggggcaataatcatgaataatcttcttcaggttagtccgaagctatttccgtataaatccatagtgactacaacattttagctggtttgactattttttctcatctgggatatgttttggtctaatgcagcatctgaaagactcaacagatccagtgatgaaaggcattttggctgagacagaactcatgttggctcaggggaaaatggatttacctctcagcttatgttttgcagcagccagaggagacgatttactgctgcatcagttgctgaaacgaggctcaaaccctaacgaaaccgataagaacggtcgaaccgcgttggtaagccccgaaatcccctgtacaaaccaactatcgcatcatttttcactccaagaaaaatatcaaaatcctcactctgtttgtatttttttctgtgtatgttatctcagcatatagcagcatcaaaaggaagccaatattgtgttgtattacttctcgagcatggagcagatcctaacattagaggtaaaatataacaaaggttttatgagtccatttcgcttttataatctggtgatcgtctagttatataactgcttaactaattttgcagattcagaaggtagtgtaccattatgggaagcaatcattgggagacatgaagaaaatgctaaactcttatcagaaaatggcgcaacgctaagcttcgacacagtaggctatttctcgtgcttagccgttggacaaaacaacttaaatgcgctcaaagacattgtaaaatacggaggagatatctcactctcagatgtcaacggaaccacagctctgcacagagcagtctcagaaggaaacttggagattgtacaattcttgttagagaaaggagctgatatggacaagccagatgtttatggttggacggctcgtgctcttgctgagcatcaaggacatgaggatatcaaggctttgttttataatcagagaccagtggagaggaaaacgatacttgtttctggcacaccagagattaaaccattgatgaaacattccagtgagcctgtaatgactcaccatcattcaagggaagcaatgccgcctctggccagagccgtttctcagagacggaagctcagtaatttcaagaactcgctgtttggtatcatgtcagctgctaaaactggtaaaacgcctcttgctctctccatccttgacttaggttgcgattctttcagcctttttttcatccatatggttaaagtaatgaattcatgtttttcaaatgattcaggtgatgaaggaggagcatctaccaggactggaataagtgaaggagttggtggggtttatccggcgagagtgacaatcagtggtgaggcttcctcctccggtaaagtagtaaagttaccggattctcttgaagaattaattgaaattggtgagaagaagctgggattcgtagccacaaagattctgagcagagaaggagctgaaatcgacgacatcaggattataagagatggcgattttctccttcttcttaaggtttcttgatgacttcgcaaattcaatatgtaagaggatttaatatgttgtagtcattacaatagacggtatatccctgtcaacagtttttgtgagaggaagatcataaaaatgcaattcacttacttgcagaagaagttagtctgttacgtgacctataattattaacatctaacataaacgtgcaaaccaaaaataagacaaggataagtacttctcaatcagtgactcgatatggcagtgaaatttaaagtatccttatcgcactagagtttcaatcatcctgcttttttttctaagaaacaaaaagaagtaacaaaaagcttcctcttttagccctaaaggcagaaatgagagaattgtctagtgatctatttacttcttttcttgttgttcttgttgttatgtagtagaaaaaggtagagagcaaacaaattcatcaaaatataacaaaaagtgaggaatccaaaaaaatgtttcatagaagaaacaatcagcaaatttgtatcctctgttcccccatcctttctctgcttacttcttcttcttactcttctgtttctttgaagcaaagatgttcacaagatttgttttttttttccttttcaaataagacttaggagtgtccactgttttccggatatacctgagaataaagtaaaatatgtaaaaaggtgcgaatcaaataagattgatttcaagaatggttatatatttttaccatctgggatctgtcttctttgacacttaaggttctatgcttgagttcacctctgcttgtagtaatctcatccagaatctctgcatcataaaactcgtcttcactgttctcaacaacactcagtggaatattatgcgcctctcttaattccccattgaagccgaagctggagtttcgttgtggtgcaccaaccatctcttcatactctgaagaatctaaaacttggagatgagatggatcaaaaagtctctggaggatgtattgtcgtaacgcaatgaggatgaagaatggcaaagggaacaatattcctcctacaggtatccatgtcactccatagcatatcagaaaatatagaagctggaagagtgtgaacataacaatcgacttgtatggtactatctccacaaatgatgcatgtaaaccttcaagaaccctgttcacacacacaaaacaaagcaaaacatatcagaaagtttataaacatgttaaaagaggttgggatgtataagaagagagtttcagtacttgaatcgacgtccaggagtgatgaatagtaactgaagtctttcccagaattgattcccagggagactatcaacagccatgtaagtgaagtaaccccatagaactgaagttggtatcattctgagaactggtaccgctagtatcaacaatccaacaaggactgattgcaatagattgctcactctctgctcgttaactctaaccggcaaatggtcttcgatatgtacctctggatcaaacttcttcccctttgtttctccacctccatcgtctgctttcatcactgcttctttcaagttttctaactctttcaccactgaagtagcctgaaaagtttcagtatgataagattgatgagaaattaacttcttggtaactaaaaagaaagagagggagtgaatttatgagacagatatggttagatgccttaggggatgtttccatttctataaacacatcttgcatcctcccatagatctctgagttacttgctttttccctcatgcattcttttgctttctggaccattttctttctcatttgctgcaattgatacaaaaaacgtttcagatttcaaacaatgtaaaaactaagggaaaaattattcgattttctctaacctgcttcttaagaactgcaagactctttgtgtgcataggggattgtggaatgaccccattcgaaggaggaagtccaagtaggccacagattagtgtctacaaccatttagaaatgaattagtatttgattcatacaaatgcagcagctaaagaatacagaagtcgcaagccatcatcataaccataccatgattcctaaaataaagatatcatagtgataagccgtcggatttttgagattgaactccttttgctgagccatttgtgcagatacacagtgatcaaagaagtataggccagcgatcatgattgctggtataaatgcagcaaggatgtaaagaggcgggaccttcgccatatcctgcaaatttagtccaaaagcaatgattggagtttctctgttgtaaagtgtcacaatcacaaatcataaggtaggtaatagtaatagtaccttgacgactgtccagtgatacaaggactcggatgcccaaggaagtggcaattccagcctccttggaactccttcaggaaggtttctagggactgtgtatgaaaatgcgctccacaacacaagcatgaggagagttccataatccccgataaaacctcgcatccaccctgcaaaagtgaagatagttagtattgttcaatgaacttttcaagtttttatctaaaaagccaaggcaaatttttcacgtactaaagccatatttccatgatcttgccctcctgcttttcagagcagtgtaaagaagaccgaatgagaaaatgactgcaagcagaccattggtataccgccactggaactgatacacttccaaacttggatcgtcagattttgggacaagaaactcgccgataagtccctgcataaggaaaacacaaaccttttaagttttaaaatgtttgaaagacttttgtgtgactataaccatgtaaatacccatcaccaccttaacagcctcttggatgaaaagaacagttatgagcattccaaagagctctcctgcaattcttgtaaacctagaaatgatgttgcatgcgtttaacatagcaagaagcataagcaaaactgctgtccagacacagaccctgttaaacaaaaaagagaaaaacaaagagtttcaatgtaagtgaaagaggaatccgcaaaaacaacagaaaggaaaatgagaagtttacataccatccagcccaagctaggtagagtttctgacccaattcaggcctggatttgctgaagctgtgaagataagtatacataatgatagtgggttctgcaacaccaactatcaagagaggttgtccaccaaaaactgaatgaataattccacaaagagctgtggaagctaatgattccgctatgccaagacttcgatctaaagcaagagtttgattaaaaaaaaaaaaaacaatcagacaagctctctggaagcaactaatataagatattgagatatactatctgtcacctgtctctctgcttaactgctcgccgaatgcaatgacaggtagtgcagaggcaatgaaaatatagagagttggagccagtatcctgaaatccattgttcaatgataagtttgcaaaaaaattctgaaagaagttaacgaaaaaagcatgaacaaagtataatacctaacaccagaattgaaggcagcaagccagtcttgtttgtaacactttcttcttccattgaaatcgttaataatcccaccaaatgggaatttaactccctccatagcaataccaatgaaggcctcctgtgtgtggatccatgcaatgaaattaacaacagagatgattataatggaaaggtagaagaatcaaagcctaaaaacacttgagtttccatattaatgttgtttaactatacaaatcgatcaaacaaaggagaaaatccgaaatgaaatcaatgacgtacgtacagacagagacacagaggtgcatgcgtaaaccaaagtctcaaggaagaaagtaagatcgcacgcacctggaggagaagaagaaagcgatggccgccgccgtaatagaaaaatcgaccaacgtgagagatccgatttccggtgagatatataatccggtggggagcgagggagaagaaacgaaacaaaaaaaaaaagcagataaaatctgttatcgttgaatttgggatctctctctttcttttgttttagttttagaaagaaagagagagagagagagagtctatccctgagaggaggcagagatgaatatttggagaaggcaacaaaaaaaacgcatgaaagagaaagattgggtgagatatattcgccacatcccgcgaaatatttgctctcttcgctaaaaacaatttttcaaattattattatttttttctttcacaacaactgattatactaaatattgattgagatttgggaacatagacgaatcattgttccacaaataaatttatttttgaaaataatttctctcgattcaactgtaactttaaacttgggacacaagcaagtaaaaaccctaaaagacagatgaaaaaggtgaataattaaggtacaacaagagcatatctgtgtgtgtttatagcttaaacgccaggaatgggaaaacgagatgtgaaggtttccactctctcctttagactcttcactctctctttcaatggaaactcaggagatgtcacgaacttgttgaaatcttgaagctttgaacccggcgcggctttcttggcttccattgttatctccacaccttccttgatgaagtcagccactactacaaagtctttctctgacagtcctcttgtcgtcatcgcgggggatcctatccttattccccctggtaccaacgcacttttgtcccctgtttcaccatttcacatacacaacaacactgtctcaatttcactactctaggggaatcaaacatataaatatagcaattgatgattttgctataacaacaattaagcatttctttaacagttgtgttctacaagttctacttatcgacttcatttctgttttgtaaaagagtaagagggcttctctcagaattgacttttcaaatgggaagaagaagaccgagagtaggaggacgaactcaccagggacagagttcttgttgagagtaatagatgccatgtctaagattttctcaacccgcgcaccatccataccctaaccacaacaaaaatgttagactgacaccgcattatcataagtgattttctggtttaagaaaaaagttgatttattcaagccattaatacagtttgtaaacttaccatgggtctaagatcgacgagaaccaagtggttatcgctgccaccagaaactagcttaaacccgagttcaaccaatcggttagctagagctctacagttagacacaacctaaacaagcagcaaaagattcttgttagaagcaaaatttacaaactttatccggtgcagaagaacttaatgatcaagtaaaagggtgggtactcttttctggtacgccttgaattccggtgattgtgcgtgtttcaagcagactgctaatcctccaattgtgtggttatgagggccacccttcaaatatacaattcagacaacttttaatcacgttgggagaagaattatctaagagagctaaaaataatggtgaatatctcaacctgcaaaccagggaagacagcattgttcacggcagattcaagatcaaccccattaattggatccttcctgaagaagatcatgccacctctcggacctctcaaagactagtaaggtaaaagtgtgttactaacagataatctggaaacgctttttgtctaaatacaaatggaaatcatgtttcatatttcggaacatacataccttgtgagttgttgttgtaacaatatcacaatactcaaaagggtcagctaccacagaagcagccacaagcccactgatatgagccatatccatcatcagaaaagcaccaactgagtctgcgatcttcagaaattcatacaaattgtgaggaaaatgaaataacagatttatatttgaaagccaaaagtagacagaaacatgaaaggtgttttcaaggatcaggttgtgtttctaccttcctcatgcgaggatagtcaaaatctcggctgtatgcactagctcctgcgataataagctttggtctgaaaagtgtagcagttttctcgagcatatcgtagtcaacaatgcctgttcaaatattcagacatcaggaaatagcctcatacaaaagtagtttcagagacccttctcataagaaatgcattacctgttgattcatcaagtcgataaggcatggactcaaagtatattgaagttccagatacacgccttttagcggtcatgaacccatgcgacagatgaccaccgtgaggtaaatccaaaccctaatcgtataaaacaagccattatattcaatctatatcaagcacacaagtaaagcggagatgaagagtgcaaaagttctttaccatgatccgatcatgagggctaagtatcgcagtgtagacagcaaagtttgcaggtgaaccagataacggctgaacattaaccccccatttcgtagaatctaagcggaaggctgccaaagcccggttctggcaaagcgtctccaactgatcaatgtactcattgccaccataatatctgtgagacatggacaacagaaatactatgaaatctagcagatgagacagaagtgcaccacaaaaactaatcttacatacttcattaccttttaccaggcagtccctcagaatacttgttggtaaggcatgagccaaccgcctccataactgctcgagacgtgaaattctcagatgcaataagctccaagctcctgaattgtctatctttctcctttgtgatgatggttcggacctctggatcaacttcaccaagaccatagtcctcaaaagggatttctttgcctagatattcagtcatcaaaaagtaaaaagaaatcaaaaccacgcatgaaacaagtaaaaatatctttcacatcatcaacataatcaaggaaatgaaacttaaactatcttactgcttatctcgacattaggtagcgagactgaagatgctctcatttcagagaccaggtttcttttcagaaatgaagaacggaaaggttttgaaatattgaacttcaactgctgagaaaatttggtcactggaggcataattgggggaaagacagatccttgaacccgtccaggttgctgaagagaagccatcgaattaccaccacaacaagcttgcatctttctctctactcctagactcaaaaattccaaatgtcacatgaacgcaataaacagagagaccactaattttactcagtagatatctgaacaaatattctcgtctcaaatatatatatatatatatatatatatatatatatatatatatgtcaaaattgtaaaaaaatccttgttttatcgcaaattttcccaaaagtgaacaacaaacgtgttgaactttatcagctcataccaaccaaacaatacatcaaattactaaatataatagatacagcagagggaattcgcattcaaaaacggattttgaaaggaaaatctttcggaaactaaaaacccagaaagagacaagcgaggaaacgagaacagagtaacactcaccggaaaggtagaaaatttgtgagctttggagacgaggtcgctaaaaagaaggaagacagagattgaatgatacagtggaggagacgatgaagtgactatgtttagggttttacgggatatatcacaacaaaaaaagctccgggttccaggaacgggacagccacctaaatatcacacgtgaaacgacgtcgtctagtgtgatgattggtttaggacaaaacggttctgcttggtatgcaatttgtataga

SEQ ID NO: 658 - DNA, 36270 bp, Arabidopsis thaliana
cgagcatggagcagatcctaacattagaggtaaaatataacaaaggttttatgagtccatttcgcttttataatctggtgatcgtctagttatataactgcttaactaattttgcagattcagaaggtagtgtaccattatgggaagcaatcattgggagacatgaagaaaatgctaaactcttatcagaaaatggcgcaacgctaagcttcgacacagtaggctatttctcgtgcttagccgttggacaaaacaacttaaatgcgctcaaagacattgtaaaatacggaggagatatctcactctcagatgtcaacggaaccacagctctgcacagagcagtctcagaaggaaacttggagattgtacaattcttgttagagaaaggagctgatatggacaagccagatgtttatggttggacggctcgtgctcttgctgagcatcaaggacatgaggatatcaaggctttgttttataatcagagaccagtggagaggaaaacgatacttgtttctggcacaccagagattaaaccattgatgaaacattccagtgagcctgtaatgactcaccatcattcaagggaagcaatgccgcctctggccagagccgtttctcagagacggaagctcagtaatttcaagaactcgctgtttggtatcatgtcagctgctaaaactggtaaaacgcctcttgctctctccatccttgacttaggttgcgattctttcagcctttttttcatccatatggttaaagtaatgaattcatgtttttcaaatgattcaggtgatgaaggaggagcatctaccaggactggaataagtgaaggagttggtggggtttatccggcgagagtgacaatcagtggtgaggcttcctcctccggtaaagtagtaaagttaccggattctcttgaagaattaattgaaattggtgagaagaagctgggattcgtagccacaaagattctgagcagagaaggagctgaaatcgacgacatcaggattataagagatggcgattttctccttcttcttaaggtttcttgatgacttcgcaaattcaatatgtaagaggatttaatatgttgtagtcattacaatagacggtatatccctgtcaacagtttttgtgagaggaagatcataaaaatgcaattcacttacttgcagaagaagttagtctgttacgtgacctataattattaacatctaacataaacgtgcaaaccaaaaataagacaaggataagtacttctcaatcagtgactcgatatggcagtgaaatttaaagtatccttatcgcactagagtttcaatcatcctgcttttttttctaagaaacaaaaagaagtaacaaaaagcttcctcttttagccctaaaggcagaaatgagagaattgtctagtgatctatttacttcttttcttgttgttcttgttgttatgtagtagaaaaaggtagagagcaaacaaattcatcaaaatataacaaaaagtgaggaatccaaaaaaatgtttcatagaagaaacaatcagcaaatttgtatcctctgttcccccatcctttctctgcttacttcttcttcttactcttctgtttctttgaagcaaagatgttcacaagatttgttttttttttccttttcaaataagacttaggagtgtccactgttttccggatatacctgagaataaagtaaaatatgtaaaaaggtgcgaatcaaataagattgatttcaagaatggttatatatttttaccatctgggatctgtcttctttgacacttaaggttctatgcttgagttcacctctgcttgtagtaatctcatccagaatctctgcatcataaaactcgtcttcactgttctcaacaacactcagtggaatattatgcgcctctcttaattccccattgaagccgaagctggagtttcgttgtggtgcaccaaccatctcttcatactctgaagaatctaaaacttggagatgagatggatcaaaaagtctctggaggatgtattgtcgtaacgcaatgaggatgaagaatggcaaagggaacaatattcctcctacaggtatccatgtcactccatagcatatcagaaaatatagaagctggaagagtgtgaacataacaatcgacttgtatggtactatctccacaaatgatgcatgtaaaccttcaagaaccctgttcacacacacaaaacaaagcaaaacatatcagaaagtttataaacatgttaaaagaggttgggatgtataagaagagagtttcagtacttgaatcgacgtccaggagtgatgaatagtaactgaagtctttcccagaattgattcccagggagactatcaacagccatgtaagtgaagtaaccccatagaactgaagttggtatcattctgagaactggtaccgctagtatcaacaatccaacaaggactgattgcaatagattgctcactctctgctcgttaactctaaccggcaaatggtcttcgatatgtacctctggatcaaacttcttcccctttgtttctccacctccatcgtctgctttcatcactgcttctttcaagttttctaactctttcaccactgaagtagcctgaaaagtttcagtatgataagattgatgagaaattaacttcttggtaactaaaaagaaagagagggagtgaatttatgagacagatatggttagatgccttaggggatgtttccatttctataaacacatcttgcatcctcccatagatctctgagttacttgctttttccctcatgcattcttttgctttctggaccattttctttctcatttgctgcaattgatacaaaaaacgtttcagatttcaaacaatgtaaaaactaagggaaaaattattcgattttctctaacctgcttcttaagaactgcaagactctttgtgtgcataggggattgtggaatgaccccattcgaaggaggaagtccaagtaggccacagattagtgtctacaaccatttagaaatgaattagtatttgattcatacaaatgcagcagctaaagaatacagaagtcgcaagccatcatcataaccataccatgattcctaaaataaagatatcatagtgataagccgtcggatttttgagattgaactccttttgctgagccatttgtgcagatacacagtgatcaaagaagtataggccagcgatcatgattgctggtataaatgcagcaaggatgtaaagaggcgggaccttcgccatatcctgcaaatttagtccaaaagcaatgattggagtttctctgttgtaaagtgtcacaatcacaaatcataaggtaggtaatagtaatagtaccttgacgactgtccagtgatacaaggactcggatgcccaaggaagtggcaattccagcctccttggaactccttcaggaaggtttctagggactgtgtatgaaaatgcgctccacaacacaagcatgaggagagttccataatccccgataaaacctcgcatccaccctgcaaaagtgaagatagttagtattgttcaatgaacttttcaagtttttatctaaaaagccaaggcaaatttttcacgtactaaagccatatttccatgatcttgccctcctgcttttcagagcagtgtaaagaagaccgaatgagaaaatgactgcaagcagaccattggtataccgccactggaactgatacacttccaaacttggatcgtcagattttgggacaagaaactcgccgataagtccctgcataaggaaaacacaaaccttttaagttttaaaatgtttgaaagacttttgtgtgactataaccatgtaaatacccatcaccaccttaacagcctcttggatgaaaagaacagttatgagcattccaaagagctctcctgcaattcttgtaaacctagaaatgatgttgcatgcgtttaacatagcaagaagcataagcaaaactgctgtccagacacagaccctgttaaacaaaaaagagaaaaacaaagagtttcaatgtaagtgaaagaggaatccgcaaaaacaacagaaaggaaaatgagaagtttacataccatccagcccaagctaggtagagtttctgacccaattcaggcctggatttgctgaagctgtgaagataagtatacataatgatagtgggttctgcaacaccaactatcaagagaggttgtccaccaaaaactgaatgaataattccacaaagagctgtggaagctaatgattccgctatgccaagacttcgatctaaagcaagagtttgattaaaaaaaaaaaaaacaatcagacaagctctctggaagcaactaatataagatattgagatatactatctgtcacctgtctctctgcttaactgctcgccgaatgcaatgacaggtagtgcagaggcaatgaaaatatagagagttggagccagtatcctgaaatccattgttcaatgataagtttgcaaaaaaattctgaaagaagttaacgaaaaaagcatgaacaaagtataatacctaacaccagaattgaaggcagcaagccagtcttgtttgtaacactttcttcttccattgaaatcgttaataatcccaccaaatgggaatttaactccctccatagcaataccaatgaaggcctcctgtgtgtggatccatgcaatgaaattaacaacagagatgattataatggaaaggtagaagaatcaaagcctaaaaacacttgagtttccatattaatgttgtttaactatacaaatcgatcaaacaaaggagaaaatccgaaatgaaatcaatgacgtacgtacagacagagacacagaggtgcatgcgtaaaccaaagtctcaaggaagaaagtaagatcgcacgcacctggaggagaagaagaaagcgatggccgccgccgtaatagaaaaatcgaccaacgtgagagatccgatttccggtgagatatataatccggtggggagcgagggagaagaaacgaaacaaaaaaaaaaagcagataaaatctgttatcgttgaatttgggatctctctctttcttttgttttagttttagaaagaaagagagagagagagagagtctatccctgagaggaggcagagatgaatatttggagaaggcaacaaaaaaaacgcatgaaagagaaagattgggtgagatatattcgccacatcccgcgaaatatttgctctcttcgctaaaaacaatttttcaaattattattatttttttctttcacaacaactgattatactaaatattgattgagatttgggaacatagacgaatcattgttccacaaataaatttatttttgaaaataatttctctcgattcaactgtaactttaaacttgggacacaagcaagtaaaaaccctaaaagacagatgaaaaaggtgaataattaaggtacaacaagagcatatctgtgtgtgtttatagcttaaacgccaggaatgggaaaacgagatgtgaaggtttccactctctcctttagactcttcactctctctttcaatggaaactcaggagatgtcacgaacttgttgaaatcttgaagctttgaacccggcgcggctttcttggcttccattgttatctccacaccttccttgatgaagtcagccactactacaaagtctttctctgacagtcctcttgtcgtcatcgcgggggatcctatccttattccccctggtaccaacgcacttttgtcccctgtttcaccatttcacatacacaacaacactgtctcaatttcactactctaggggaatcaaacatataaatatagcaattgatgattttgctataacaacaattaagcatttctttaacagttgtgttctacaagttctacttatcgacttcatttctgttttgtaaaagagtaagagggcttctctcagaattgacttttcaaatgggaagaagaagaccgagagtaggaggacgaactcaccagggacagagttcttgttgagagtaatagatgccatgtctaagattttctcaacccgcgcaccatccataccctaaccacaacaaaaatgttagactgacaccgcattatcataagtgattttctggtttaagaaaaaagttgatttattcaagccattaatacagtttgtaaacttaccatgggtctaagatcgacgagaaccaagtggttatcgctgccaccagaaactagcttaaacccgagttcaaccaatcggttagctagagctctacagttagacacaacctaaacaagcagcaaaagattcttgttagaagcaaaatttacaaactttatccggtgcagaagaacttaatgatcaagtaaaagggtgggtactcttttctggtacgccttgaattccggtgattgtgcgtgtttcaagcagactgctaatcctccaattgtgtggttatgagggccacccttcaaatatacaattcagacaacttttaatcacgttgggagaagaattatctaagagagctaaaaataatggtgaatatctcaacctgcaaaccagggaagacagcattgttcacggcagattcaagatcaaccccattaattggatccttcctgaagaagatcatgccacctctcggacctctcaaagactagtaaggtaaaagtgtgttactaacagataatctggaaacgctttttgtctaaatacaaatggaaatcatgtttcatatttcggaacatacataccttgtgagttgttgttgtaacaatatcacaatactcaaaagggtcagctaccacagaagcagccacaagcccactgatatgagccatatccatcatcagaaaagcaccaactgagtctgcgatcttcagaaattcatacaaattgtgaggaaaatgaaataacagatttatatttgaaagccaaaagtagacagaaacatgaaaggtgttttcaaggatcaggttgtgtttctaccttcctcatgcgaggatagtcaaaatctcggctgtatgcactagctcctgcgataataagctttggtctgaaaagtgtagcagttttctcgagcatatcgtagtcaacaatgcctgttcaaatattcagacatcaggaaatagcctcatacaaaagtagtttcagagacccttctcataagaaatgcattacctgttgattcatcaagtcgataaggcatggactcaaagtatattgaagttccagatacacgccttttagcggtcatgaacccatgcgacagatgaccaccgtgaggtaaatccaaaccctaatcgtataaaacaagccattatattcaatctatatcaagcacacaagtaaagcggagatgaagagtgcaaaagttctttaccatgatccgatcatgagggctaagtatcgcagtgtagacagcaaagtttgcaggtgaaccagataacggctgaacattaaccccccatttcgtagaatctaagcggaaggctgccaaagcccggttctggcaaagcgtctccaactgatcaatgtactcattgccaccataatatctgtgagacatggacaacagaaatactatgaaatctagcagatgagacagaagtgcaccacaaaaactaatcttacatacttcattaccttttaccaggcagtccctcagaatacttgttggtaaggcatgagccaaccgcctccataactgctcgagacgtgaaattctcagatgcaataagctccaagctcctgaattgtctatctttctcctttgtgatgatggttcggacctctggatcaacttcaccaagaccatagtcctcaaaagggatttctttgcctagatattcagtcatcaaaaagtaaaaagaaatcaaaaccacgcatgaaacaagtaaaaatatctttcacatcatcaacataatcaaggaaatgaaacttaaactatcttactgcttatctcgacattaggtagcgagactgaagatgctctcatttcagagaccaggtttcttttcagaaatgaagaacggaaaggttttgaaatattgaacttcaactgctgagaaaatttggtcactggaggcataattgggggaaagacagatccttgaacccgtccaggttgctgaagagaagccatcgaattaccaccacaacaagcttgcatctttctctctactcctagactcaaaaattccaaatgtcacatgaacgcaataaacagagagaccactaattttactcagtagatatctgaacaaatattctcgtctcaaatatatatatatatatatatatatatatatatatatatatatgtcaaaattgtaaaaaaatccttgttttatcgcaaattttcccaaaagtgaacaacaaacgtgttgaactttatcagctcataccaaccaaacaatacatcaaattactaaatataatagatacagcagagggaattcgcattcaaaaacggattttgaaaggaaaatctttcggaaactaaaaacccagaaagagacaagcgaggaaacgagaacagagtaacactcaccggaaaggtagaaaatttgtgagctttggagacgaggtcgctaaaaagaaggaagacagagattgaatgatacagtggaggagacgatgaagtgactatgtttagggttttacgggatatatcacaacaaaaaaagctccgggttccaggaacgggacagccacctaaatatcacacgtgaaacgacgtcgtctagtgtgatgattggtttaggacaaaacggttctgcttggtatgcaatttgtatagatcgaattctttcattggttttgttgggtacagcactacacagggtgtggccaaagaggcaagaccatttgtatcaacaacataattgcttgagataaatcataacttgagaaagaaaaaaaaaagataaaacataactacagtatatagaggaaacagacttgataaaatgactagttcagttttaacaaatcatatacaaactctttgtctttgattataagagaatacaaacatgaagatgttctccaaaaggacttattcaaaagttttaaacaaatacaaaaaattggggatccaaaagtggttctcagttttcacacaagattttcgtctagacattggaacgatataacaatgaagataatcaagaagccatgtttttccagatttgcaagtagaccacaacatatacagaccggatatatatatatctatttcgttggccatgtcgcttgtgcagacataataattcccacaataactccaaacaacccgagagcactcccgaatatctcgatcacaagaatctttacaaaaagtgtggagttctgagcatcggacaatgcacaactgcttccaatgattcctacacataacctgcaagagaaatgtggacctcggttgcatatctgacaatggaatccaaaaaccaaaactgtaaggaaggagaaaagggtagatacagacccgcatacaaggttggcgaatccaactataattccagatgcaaagattgcatatccagctctaagagactcagcatcatacatctttgaagatgggacactctccaactttgtttgcagtatgattgcaacaataactccatatatagcaacagcttcgcaaaagatgacactgggacagtttaaaagaacaagaaatgcttcgtcattgtatactttttgcatctaatcttgagcctaaagctctgttaagtgttaacaaagtagaaaatgtagaatgcaaacacaactgtttcctacttaagcattcctaagtactagtgcctttacagccaaatgctctactcaatatggttaagaaatggtgtgtggtaatgacactgttgacactgatgttgcagagcatctaactccaagcctgtagctctgtaacaacaaatcaaattgcatacacagctactccctgttaagcattccttaaatctaccccgtagacccatgggatataatagcaatgactgtgttgagtgtttacttaagtgactccggcccaagaatgaaggagcggaataggaaggcaccacaaataacgtaaacacaaactttaaatctatatcccctaatttaacatttagctatctcgatggtagatatatgtttctgctgaaatacgtggaaagacaaaagacacttcattatcattacatccagtgcttgaatccgcaaagccagagccttcacgatccaaagttactagccctaccaaccagatgagtccttgagaattctaaatttctacctcctgaatcccaggtcaacaacttgtatcataatgtgacaatctactcttgcagagatgtggcattgaaatatccaaatgaatcaagctactcagcgatgaattctcattgctattcagaacaagacatggaatctacacagttccttaaagccactaattgatcaaccaaaggaacaaaactagaattaaaaaagcttgaaacttttaacgaacctgatgagattcttcgaagtaatacgaggagcttctatagccgcaccgatcaaactacttcccgtaatgtaaattcccctgaataagacaaaccaaaaaaagatgatgaaaaaggtcaatgctttaatctgcggggacgaagaagaataagattcgatttaccaggcggcaccgaggactgagacaccgatcgagatggcgattccgattgcggagaaagtatacggcgagatccttaccagcgctgcgccccacgagctcgcatgaccaagagcaaccacaccagacatcctctctctctctctctctctctctctctctctctttttctctctttctctgttattccgatggtcgtctcgtgatgatacgatctgcttctctctctctctgtcggagaagagaaattatcagggcctgtgatctgaagatattcaggaattgccaatcacgcgctgctgaatgcgcgtgagtactttgtggaaaccaaaacgacaacgtatcttcgttagttttggtctcgtgactcgtgcgatctaaaccaaccacattcgtcaaaaaaaaaaactgaaattttagggcttggtgaatttttctttaatttgaaggtttacgaacgtatgctaatgatttgatcagtgaaaaagatttatcgtctaattctagctctttgattattccgcttattttgccgacagatgataaataacaattacaaaggccaaagcatatatatttgcatgactgatttcgtttcatttataaaatttaagacggaaattagcctattattataatttattttttgaattttggtccataaatattaagtttgattaccttcaaaaattttctactctataatcaaatactaatgtaaatcttaaattttgaaaaacacgtgacttaaattacacaatatttcgagatcataaagcccaaatgatgcatgctactgataaagattttattagtcaaaaacataacatttcgtcttgatgtgaaaatcaattaaccaacgtcaaagatacataacagaatggataagttttctattacaacattgtagtgtatttttggttatatatatacaagaaagtcgtatctcggtatgctatagtaaatatcagtgtattttctattacaacattctagttaactccttttctttcattaacctttccccacttctcccgtcagttgccccgaccctgtcggcagaagttcacgattgggcgacacaccttcaattagaagaaccttgtaacatgttataattatggcacctagtattagaggcgccagcagccaatttgaaggggttatttcatagagtaaaacaaatgacgcctgagtaaacccacctgctatatcatattcttccgtgatgcgaaacacgacgatgaaatgtataagatataggacaaacaaaacgccatgtaggaatgtcctatatataaataaaatatttatgcattctattttttttgcataatcacaaataataatagtatataaaaattatattaaaactttatagaatatttttaattttataagcattttgtaagcaaaaaaaaaagaaaaaataaaaaaattatatttttaattatagctctaattagatttttgcctgcaaaaccattcattaaattcacgtaatcgagtttttcaaacatagttgttttaatggatagcaaagccaactcatttatttgattaatcaaaacaaagttttttattttgtaatcaaagttcaagcaccttacattagaaagtttttaatttttaatttttctttaattgtttattttgtaatcaaagttttagagtttaagtattttccaaaagcttaacaaactgcaaggaagtgttaccgccccaatagttaagagaaacacattgctctcgcagaccgaagtcctgatatctccaagtcttctttcgagatcatccattgttgttctacatttacaaatgaagccttaattaaaaaccttaaacaacaaaattaaccgaatttcgatagtatgaaaactctagttacgaaataataactagaaactcagcataaaattagggaaaattagctagcacacagacctgaaaggccaagtttcattctttttcttttttgtataaatgaaaacacttcacgttgtataaatgaaaacggtggggaatttatactaacagctctgtatacaagttatgatgcacctagcataaaactaaacaaatatacatacattataacttgtacattgttagtacatacataaaagctttttacctttttcgtatctcgttttttctttcctttcctaattattctttcatctttctggttatccttttaagttgattttccatttcaatattctcattttttacattaaataatttggtcaaataaaaattacaatatgcgcatgcatacgaggttgtatggtaaattttttattttatttttataaaccaatttttaaaagataactcaagcacttttgtattacgacattgtatggtactatcacacatataaacaagcacatcaagtgttcatataagcaaccacctgactaactgtttaaggataaattatcatattttcatttaatttaaaatgctatcctgatcccccgctgaattaagaaactagaatataccttaatcacgtttttgggtggaccacaagaaaataacaaaagcaagtttctaattttcaattttgatcttgatcctttactctctgtttctcttctcttttcctttcgttcatttctttttttggtttgtcaaagtttagtttttcttcttcttttctttttcaacggcaaaaattttcttcttcttttgtcttttagttaattattttgatggtaacttctttttttatctatagttaaattattgttattggtgattaagaatgattcttacttaaaaaatatacgcaatgccttgtttccaactttacattgcatcatcatgcatagagacaaatactaaaatagtcttacttatttttggtccccaatatcaaaatttgtgctgcatagcctgcatgggaagaattattggcatatgaaaatattgttgaatcaatgtaacgataaataggataaaccaaaatatatatatagtttttttaaatggatatgaaggtacgattcaacgtgagtgagaactgagaagaaaaaataacaaggattcgaaatataaaagataacgtttttattgtcagtcattcgaaatataaattagaaaacaaaacagttattgggcctaaaaaacaaaatagaaaacaaaacagttattgggccctaaaggccttttcttattccttcgtcccacttgctgatgcatcaaatcaattttaagaaaagaaacaaaaaatgaatacccatcaaattttcttaatttttatttcatttacgggtctaaatggtgcacttgacttgaaaatggttgagaaaaagtaacggaatattttttttgacagatcatttactaaattattcatatcatttagttacaaatattttaaaagtttctcaatgttgttaatattattttgtttttagtaaattatgaatactttaatattgtaaatcaaaattttcattagtttgcgtgataattatataaaaaatatattagttaactcttatttaaaaatcaccaattatataatacatttgtttgataaaactttaaaccatattaacttgaatttatatcaaaaccacattattttttcatgagagttactgctaagattttggataattataaatttaagtttttaaaagtaattgattaatttaagaatatatgtcaaccatatttttagttaccatttagatccataaattttcagaatcgaaagtattttgaacatgatgattgtcaaagaaaaaaaaaaaagagtacagtattttgaacattaataatgattaatacacctcaattagctttgttttttgttttttttttgtcaaacaagatttgtattcattccatcagatcccataagggcaagtttacaaagttctcaaagatgaaacaggttacaaagatcttaaaaaaacataagttagcaacaaagagagataacttgagaagatagaccaatgagagtcggagacagaggcaaacaagccacataccacacacgacttcaaagtgtgtcaaagacacttccacgaacacttcggggaaatatgaaatagtcactatcaaaccaagataaagtgacgttgagaagaagtcctttgcctcatggttcggcgacgcgaaacgcatagaagttccgatgaacgcgaaatatacaataatgttctctaatttttataatgccatattagatgatcatattaacttccgatttaatttcgtaatatttagataaatagatattattatttttaaagtatattaagaagttaaaattatctttatacaatatttcttaaagaatgtaaaatttctaaaaaatttatcttagtgggacggagggaatatattgtatggatatcaaactgccatatcactttctaataacaatgtgaatcacagaggtgaagcgccatattacacattatgtaagattattatcagtttactatgggctcataaaatcatcatctaaaaaaaaacactagatatctatatattttgaattaaaataacacaaagaatgtatgaggatatataacgcaattcatttagtaaaaaatatgtttgagttggaaacgtctgaaatttgttatgaagtgaatatttgagtaactttaccactaatctacttttgtttataatcaccttcggctatttttttttcttttcttttgttgtaaaagaaaattttgacaattaaaattaaatgaatgttggctcacacaatgcacaatgatatcaaactcaaaagtcaaaacactaaatagttttcaaaatatccaggcaattaatcggttgattctcttgtttccttttttatgtttcgacgattcgttccccaaaatcaaatgggaagaagagcgaataatttacttaaccttcacgttttccatttattacactgtctttttggactgccattttactattccaatgcctctttcaccactctttctcttatccattcaatctattgattttttttttacattttccaagttttactcttttacataatagtataatactattttaaaaaaatactcaggcttattagatcaatcatacgaacttgagataactaaactaatatttaggattttaacttgatgaactctcataaattcataatcgtattaagaaattatgttgtaggtttttttacacaaatatagaaaaagtaacttttaaatattttaattattattttgtttatttaataatactaattctctttctctccttattctataggttaaacatgaatgtctcagatattataaaattttgatacttctaatagttttaagagatattaggacacgaatgtttattgaattataccatattgtagattctttattaaaaagattaattctaattgatatgagtgacaacattttggtagctagctcagtggttcattagttacatgtacagtttttgttttgtttaaatcaccgtgtgatgtacgattatgacatggtaaaccattatgaaggttatcatcaatatagctctctttgagtattccgctaatcttttacagaatgtctaaactctaaaggcatctccaacctatttttttatttaaaaataaaataactaactctattttagagttaagttttattccaatcctattcaatttccaatttctaaaatagagatctaatgtaaattaaaaataaggatctcttaaaagataaaaaaaaaatctttatttttgaagttaaaaatatagtagaattaagaggtttttttgctttctaaagtagccttaaagaatatagaacagaattggagtcggtctaaaaaacagaatataattttagtatctaaatataacaataaaaaacaaatgtactatgtttgtaaataaaacgtcatagagaatcttagaaggtcccacaaacccaaatcacaaatgaaaaccccttctataaattccaattctttctcacacccaaaagaacatttttctccaaaagttaaacatacctcactctttagtctctccactctttaaaacattttccatcatccatcaagaatggagtctcatcctcacaacaaaactgaccagacccagcatatcatcctcgtacacggtcccatcatcatcggagctggcccttctggtcttgccacttcagcatgtctctcgagccgtggagtcccttctttgatcctagaacggtcggattcaatagcatctctatggaaatctaaaacctacgaccgactcagactccatctcccaaaacacttttgccggttacccctcctggacttccctgaatattacccaaaatacccttccaaaaacgagttcttggcctaccttgagtcctacgcttcccacttccgcatcgctccaaggttcaacaagaacgtacaaaacgcagcttacgattcttcctccggtttctggagagtaaagactcatgataacacagagtacctctccaaatggcttatcgtagccaccggtgagaacgcagatccatacttccccgagattccagggagaaagaagttttccggcggaaaaatcgttcacgcgagtgagtacaaaagcggcgaagagttccggcggcagaaagttttggttgtcggatgtggaaattccggcatggaaattagcttagacctcgtccgacataacgcatctcctcatcttgttgtccggaacaccgtaagtataaactctttttttttttttaattacatttttgaaatttccctatcgttttgtttcaatataaacgagatgttaccaccatttctattaggttcatgtgttgccaagggagatacttggggtatcaacatttggagttggaatgacacttctcaaatgcttacccttaaggctcgttgacaagttcttgttattgatggccaatctttcgtttggaaataccgaccggttgggccttcgccgaccaaaaacgggtccgcttgagctgaaaaatgtcaccggcaaaagtccggttctcgatgtcggagctatgtctctcatcagatccggcatgattcaggtgagtgtaagtcttgaactatatctctttctatttatttattttattttctaatttagtgacaattttgcgtagccaagagcgggcaccttttagtaatttatttataaattataaatctgtatagcatacggaatcatattgtattactattagccaactttctaaaagaaccggtttatgttgaaactggtaactacaaaagaacttgtttttaaatgttactttgatgatttttatttctctttcttgccaatgtttttctagtcttaaagaatgttttcttgttcatggtgacagaaaaagttaatttttgtttgtagcattttctatttatgcttccgtaaaccaattttcttttcgtcgtcgtcatgattcccataacccatgtttccgacttactcgtttcttactttcttccttaacaaatactctatctaaatacatgacttgccaaacacttacacacatatagtcatatacatacctaatattagtgtgttgtcttttcttattgttaaaaaatgaagataatggaaggtgtaaaggaaataacaaagaaaggagcaaagtttatggatggtcaagaaaaggactttgactctatcatatttgccactggttacaaaagcaacgtgcctacttggcttcaggtatgcatttgtatatgcaattcacatctataattccccactcagaattattcaaaaacaaaattaacatcaacggccttttctatgattattagggaggtgattttttcacggacgatgggatgccgaaaacgccgtttcctaacggctggagaggagggaaaggattgtacacagttggttttacgagaagaggactccttggaacggcgtctgacgccgttaagatcgctggcgaaattggtgaccagtggagagacgaaatcaaggggtccaccaggaatatgtgcagttctcgttttgtctttacctctaaatcctaatttgcgtttttcacttctttttttgtttgtttaaagttaccacctaattttgcttgttgtaaatcgaagtaataaacttgtacagattttccttaggcagattagaagattgagaaagcttattaataaccatatttacctttgatttaattaaacgttttaagccatttaatggtgcagtatgagtattgtttttttatatgaaattttaagccagtgattcgattcgagttatgcaattgaatattaaaatgtgaagttgagagagacaaatggatatgtaagagtgtattatatgtatatatgcagacgtaaggaagagggaggaaggtggcactgatttgtcactgaaatgagaatcgatgaacgatgatagagctgacactcttctgctattaccgcaatggacgatctctttctacctaattgatccatcgctctctccatctctctgccgccatgagagactcatacacacacgcgcacacatttctaactctcttttagggtttcaattttacccaaaatacaagttcattcactcaagtgacctaagcaattgtcattgtattcacatctgaatttatggatggatcattgcagtaatgactctgttctttcacatgtatacactggcttttaaatatcttttctttttcaaatattgactttgcgcaacaagaatagtagaactatctatttgataaaaagcgtttttctttaacttatctgcttaattaattataagctatattaaaattagtttttatacctttgttttgaccaaagtgacctaaaaattacaaattttacaattttttgttgttgttttgaatgacaaaaattttacattttaagagaagataatgaggtcaaatctcttgccaaacaaaaaaataaatgctatttgagggcattgaattcgagaaacgttatgacacgcatccatgcacacttacgttaactatgctcagacacttacgtcactcttttatttttattaatagattctcatattttttcttttatttttttatggttaggggctttgtcctactgaccattttgcaggcgcactgtcaattttcatgatggatttgacatttcgctttgcatgttaagtatgtcaccgctctcttccctcgctgctgtttcttcggcttcataccctctataacattttattccatcttttagttttatcggttgatttatctatctactttaatagtactaactaaaatcacattatatcattattgtcacattatatgattattgtcatattaatttacaaaatatacttacaaatatcaatgggaaacaaaattttcaaatagaaatagctctctttaacagacccaaaagaaaaaagaaaaaaaaagaccaataattgaagtactctcggttttacacatgatcctcacttttgatgtgtcaattggtacactacccttctatgttctttccttggcttaaaaaaaagaggttcatacatcgactaattaaagactgagtttctattggtaagctagtaggggatatggacaaataaatttccattttttttaagcattattttgatgcatatagatgtatatctatacaattgtgtgatgctatagaatttatagggatataatagtgatgtaagattaaggtgaggaccacgaagggagttagaatcgagataaatactcatgatccgatgaaccgtaccttctctattgcactcttaagttggcatgcacttgtactaatcaatccactgcatatatatatgtatagatgcatggggatttgccatgcaaagaaacaaatgcacttctcttactcacgtatcatatgtagccatatatgtgaaacttgagacaacgtgcgagtcaaaatttgaaatttgtatttatatgtacatatgatgacaaaagcaaagctttcattagaatagacttgtcgtgtcctctgccattctgcatcctccctccaaatttactctcagattgctatgcccactttttcttcccttcttagtatcttccaccatttataatggccaacaatactagctcctatttcatttcgaaatttttgaacttttgaatcatcattcaattttgactataatttatgcaaatttattgcaaccactaaaattgttagaaaactcaacacccagtgctagtataaagagattatatatacaagggtttatatttctcttaataactagatattaattaactaatccattctaaattttgtgttaattgcactagctagtaaaacttaagctagcttaaaactcaacctcacgcttgacttgctgctgtgtacttcatagctgacatatagccttagcacttgtggtcggatagctaaaatgttatattaggtttttaccttaagaatatgtaaaattgtattgaaatatttttataacaaattgtagtgaaaaaaaacaacaacaaatttgatggtcgtaaagatatgacctcaattctagaacaaaaataaactaagtggctaaaaagaaaacaaaaatgaatggtcttattctgttgttaatcctctaaatctctaaaacaattaggtctgccaaaaaaaaaaaaaaaaaaaaaaaaaaaacaattaggtctgccattttgataatcctctaaataaatgtgggctcaattcctaccaaaacatgaaataattatgggcttaattgtccgtatggcccagttaccttataacttcccccccccctccccatggcccagttacctttcttattcagctatttcagagtcttttttaaaaaaaataaaaataaattaatttgagtctttgcgctgacttttgcttcctcgtgattttttttttttttttttcctcatgattctttctcttgcgcaaattcttcctccattgttacaggatcaaatttggatgacaattttaaaatcgttgcacataaacgtctcatttccatttatgtttaccatttttctttttttttaaatcaacagataagaattgtagtatgggtactggtagtggtgtgaggtctacgcatatacttgaattgtctcaagtctcaacaataaagagctctggaaccgacattttggtaatgtcagcaacattacatccaatcatattgttatattcatataaatagtattctcagcaacacctatgaaatgtacaactacaaactgattcaagaatactcaataatataacgactgtattcaatattccaaatataattcagcttgtatattaacattttaataaaaaaaaattggacgccactacaaaaataataatcatctttatcactacaatttgttagagactttcttgcgtatcaaattagatatacgaaaattttcaaggcaaacatgtaaggtagggtaatcacaaattattttcctacacaatgaatctagtgaatatatattataaagatgagggttttgttacatgctcaaagatcttggcgaccgcaaattgagaatttcttgttccaggtctggcagctttctgtgtgtttgtagcctagtaggggtcagctcttagaatcgtagttgtgatgaaaacagaattgtcgtagttgtcatgaaaacagaattgactaattaaaaactcttgatagtttcaaattcttttagaaccaacctccaaaaatcatgccgttcgttgattcatttcgttaccgaatttgattttatgcaaggccttggtcttatggacctgagatttaatgttgggcctcacatcaaacgacttttcaagatggattagtaaaaacagaagcacatattttttgctttaagaacttaaattactctgtttttgtatggatctttagaaaacctcaattgttttccaaaagtagcctaaaaagactttaagctcacgaacttaagtcacatggatttttgtaaataattaaacgatttaataaaactaatgaaatgataggaaaatgaccgatatacacaattgatttaaacaattgaattcgagtagttatgattttgataaaatgaaaaaggactgtttgttccctctatgatcctaaaaatgtcataaaaatgaaaaaggaaatatgaatttgataagatttacagcgaacaagacaaattggaaaaaaaggaaagaatgaatatacagatacgttaaaatgaaaaagatatttacgtcaatctattgattattaaaaggttaattttgtcattaaaagcaaaagtgctttgccaaaggcgtgctacgtcacgtaaattatacaacactatgagggctttttggtaattttacaggaataaagctaacctcataatatatcttctgcaattccgtccacccaaaacaactgacatggaaactactttttaagtttgatacaataaaataaatatacttatccggtcaacatttttattctgatgaagtaaaaatattactaaaataacgaaaaacacgttttctccaaatgaaaaaaacgaaatttacactgaaatgtttttttttgtaaaaaaaagatgtacttattcttttagtacattaataaattagaataaaaattttaattgattaaatcgctagttgctattaatcagaagagctgagctacttctaatgcttttttacagagagatgctttcttcttctttctctcgaactttctctctctaaatattttgtttcgttttctctctctctctctatttactttcgttctctctattttttttgtttggtttagcttatttgtgaagtgttaaatcttcttcagtttctggggaaattaggtggggaggtgaaaaagggggaaatataattgaaattgggttctctctgctgtgcaataataatttctgagaggattgtgaagaagcgcttttatgtaagaagatatctcattattagttatttacatgagaatctgacattcttaacaactgtctgtggggttagttttgtccaaagaactatacagagatgtctcagaccaactgggaagctgataaaatgtgagttcttcttttttatgggttttgattcttgtaattgttctccttcctactaaaggtgttaacttttttgttgggttttagattctgagtgtttttaagtgatttctagggttcggattttataaacgcattgtttttctcgttccccggctacagtttgattttagggtttgtgttcagagttaagtttcaatattttgttgcttctacttgatctggattctgctgattttgtgggtttgcttattactaacttatcgcattttttatatttagttttctcctttattggcattcttgctttgttttgccgttagaggggggttgtgttactttgcgggtttctctagtttctattctcagaaagcatttctttgctagatttctgtggttggggggaactttttagttaggtaaattttgcatgttttggccaaagtttagttctttgtgttgtcagtcactgtcaaggagcttgtaattatttttttggatatttggtttatcgcattctggttgactcttgtggcatcatgtttcttttgttactgtcccaatttcactcttcctttttgtatgcaagtatgtgactttaagctccttcaagaaagtttcctgattttggtgtttttgctcataactggatggtttgtttatgggacattgttaagtaggaagttaagcccctgtttggcgagtgccctttgttggggttttaaagacaaatttttgaatgtaacaggttggatgtctatatccatgattatctggttaaaagagatttgaaagctacagctcaggctttccaagctgaaggaaaagtgtcatcggatccagttggtaagaaatcacaatcttcttaagctttttggctactattctttataaagattatttgttctgcagttgctctgtttcctaatgaacttcattttcttattgcattgttttgtagctattgacgcacctggtggatttctgtttgagtggtggtctgtcttctgggatatatttattgctaggaccaatgagaagcattccgaggttgctgcatcttacatagaggtaggtctcttttcttttttaccctgaccactagggatactagtgattatataactgcggaaagctgcgatagtctctttagttagtgatatggagttagttagcaccttcattgtgtacagttgaatggtgttctcttttcctttctgttttaagagaagaatttggagttgaatatgtaaaatcagaaatgttttgtccaattagtatgttatggatgattgactaagctggagtatttctattttgttttggttaagttaataagatcagaaatttcgtgtgtttcttacagacacagatgatcaaagcacgagaacagcaattgcagcaatctcaacacccacaagtttcacagcagcagcagcaacaacaacaacagcagattcaaatgcaacaactcttgttgcaacgtgcacagcaacagcagcagcagcaacaacaacaacatcatcatcatcagcaacagcaacagcaacagcagcagcaacagcaacagcagcagcagcagcaacaacaacatcaaaaccaaccaccttctcaacagcagcagcagcaatcaacgcctcaacaccaacagcagcctacaccacagcagcagcctcagagaagagacgggtcccaccttgcaaatggatcagcaaatggactcgttggtaataacagtgaaccagttatgaggcaaaatcctgggtctgggagttccttagctagtaaagcatatgaggagcgtgtaaaaatgcctactcagagggagtccttagatgaggctgctatgaaggttagttttggctaggcgtgtgtttaaattttatttcttctttttgtcacaccttagtttcatcaaatggtataattcaaattttcattggctacagcgatttggggacaatgttggacaactgttggacccaagtcatgcatcaatattgaaatctgctgcagcctctggacagcctgcagggtgctgttcttatacttctatcttcattgtttccacttatatcctatgctacctcgcctagtataaaatgattttgtcgcatcgaaaaatcattcaatatctctctcttgttctaaatgccattttctggtgaatcacaggcaagtgttacacagtacaagtggtggtatgtctccacaggttcaaactcgaaatcagcaacttcctgggtctgcagtggtatgttatattgaataaattttgtgtctagccccttgtagttttttactgttagttggtagttaatacacactggcttatttgggtttaggatattaaaagtgagatcaatcccgtgctcactcccagaactgctgttccagaaggatcgttgattggaattcctggtaggtttgctgttctgagtgtatcatttcagttggttaagcgtgtcaaatgtagtataagtacttcagctcacaagaatttgcttaggattaatgactggtttcctgtttcaggttcaaatcaaggcagcaacaaccttacacttaaagggtggccactcactgtaagctttatccatgcattttactatagctcgtctcactctcttatctcaaaagaagtttctattgactgctgctttctttcctgattcagggatttgatcagcttcgttctggtcttcttcagcagcaaaaaccatttatgcagtctcagtcttttcaccaactcaacatgctaactcctcagcatcagcaacagctcatgctggctcaacagaatctaaattcacagtccgtcagtgaagagaacagaagactgaaaatgctattgaacaaccggagcatgaccctaggaaaggatggccttgggagttctgtaggggatgtgttaccaaatgtcggatcgtcattacaacctggtggctctcttttgcctcgtggagacaccgatatgctacttaaggttggccttgtcttctttttttacaaatcttaagtggctggctttcatgtctttcaaaattttgcaactctgaataaactcttaagggtattgtttggtaaatttggaagaagatataataatctctgctctttttcaatggctgtgacgtttgccctaaatttttaataattgattatgctttgtagttaaagatggctctgttacagcagcagcagcaaaatcaacagcagggtggtgggaatccaccacagccacagccgcagccacaaccacttaatcagcttgcccttacaaatccgcaaccacagagttcaaatcacagtattcatcaacaagagaaattgggaggtggtggtagtattacgatggatggtagcatttcaaattcttttcgaggaaacgaacaggtctgtttataaattcctgtttcttttcctagttcatgtttcaatgatctgttgcatacgtttttagtttctggtgagtctgaggttggttcctaaacttgttttgcattttactgaaggtattgaagaatcagagtgggaggaaaagaaagcaaccggtttcgtcttctggaccagctaatagttcaggaacagctaacactgcgggaccatcaccaagctcagcaccttctacaccttcaactcatactcctggagatgtgatctctatgcctaatctgccgcacagtggtggttcctccaaatcaatgatgatgtttggcactgaaggaactgggactcttacatctccatcaaatcagttggtgggtttccttaaactgttgatgggaatgaataatggtttctgtaatcaatatgaattagtagcgttaattattggctattttgcaggctgatatggatcgatttgtggaagatggatcacttgacgacaatgttgagtcttttttatcccaggaggatggtgatcaacgggacgctgttacacggtgtatggatgttagtaaaggtgtgtgttttagtctcacttaacattattcgacaataacacggtgaacttttcttcagtaatccaacagtatttctcaatcactacaatgatggctctgcactaggttttacgtttactgaagtgaattcagtacgtgcgagcacaaccaaagttacctgttgccacttctcatcggatggaaaaatgcttgctagtgctggacatgacaaaaaggtaagccagaaatcatcattaggtgttctagcgttctgaaacttagagagcctcttggtttggttcattttgcaggctgtactatggtacacagacactatgaagccaaagacgaccctagaggagcacacagctatgataacagatatccgttttagtcctagccagcttcgccttgcgacttcttcgtttgacaagactgtcagggtttgggatgctgataatgtaaagtgaaagttgatccatacactatgttgttttatctctgcatgaatataattttttccgacattgtgattgcttaagagtttgtgaatctactttgcagaaaggttattcccttcgtactttcatgggacattcttctatggttacatcacttgacttccatcccatcaaggatgatcttatatgttcctgtgacaatgataacgaaataaggtactggagtatcaacaatggaagttgcacaagagtgtacaaggtagatttttttctcttgaaagccaatagttcaacattatttacgtgcttaatttagcaattagatacatataatttcacttttgtctttccacagggtggttccacccagataaggttccaaccacgtgttggaaagtatcttgcggcttcatcagcaaatcttgtcaatgtactagatgtagaaacacaagctattcgacactctttacaggtttagtgttcaaacttttcaaacacgatgtttctgatagatacttattttgtaatatgtaccagcaaaagagagcaactaaaaaaatagcaaaagagagcaactaaaaaaacggttgactaattcgtttgtgtaggggcatgctaatccgataaactcggtttgctgggatccctctggtgacttcctggcatctgttagtgaagatatggtaaaagtatggacgctggggacaggtagtgaaggagaatgtgttcatgagctaagctgcaacgggaacaaattccagtcatgtgttttccatccggcttacccctcgctgctcgtaattggttgctaccaggtaaagttgaaatcattacaatatctgtttaaaaaagtttgtgaagaaagtaatgcaaaaatcccaaatttactcctaaacttgtgtgtgtatgcatgcagtctttagaactatggaacatgtcagagaacaagacgatgacattaccagctcacgaagggctaattacatctttggctgtttcaactgcaactggattggttgcatcagctagtcatgataagctagtgaaactgtggaagtgaaaactatgagagaggaaaagagacgtttgttgtttaggtattattagtaatcatggttttttttttaacttgtagtgttctctctcggccattatctcgatctcaagatagttttccagatgttgaacaaatgttgttgtatgatctgacgaaattgggatcttgagaaattgtgaacaactcttgttgtaatctttactagtccttttggctcagctttaatttactggcactcttcttcacttagtttgggttggtttggtattttatgtttgaacgtttcaataactctttagcttttcgaaacgcttgaaaattgaaatgtgagagccaatccaataatacagttgcatcttatttcaaaactacaaaagtataaaactaaacgcaaacgtgatagttgaaaacgcaaacgtgaaagttgtaaacgcaaacgtgatcctaaacgcaatgtcgaagtgaaagtcgtgatggctccgtcgtatctgaaatcgtggtaattggtgatggagaaagacgataacagtgacaaggttagcaatttagcaggatcttcatcgatttctttttgcttaattttgattcctcaatcgaaggatgaaatgttcgatgataacttgatctgttagagcaaactctgatatactctggaaaccacaggtttgtctttcagtgaaggagaaatatacgtcagagcagcctgaggaaatggtgacaaatctgaaggcatctgtaagagaattgagtgtgaaagtgaaagaacaggtgctttgtttcttctttcctcagcaaataaagtctcttgcttctatcttatggtgtttttgatcaaaccgtgcaaaggtttttacttttgttgtcatttgtaacttagaatcagagaaaatgtgatgctaaggataagttgcagcagttgcgagaaagaataagcaaggaagttgttgatgtttcagtccaggagttgataccgcttcttagatcactcaaggtaaataagtgttgagatgagtaaattgtgagtggccctaggtgatgtaactttaatagttgtaggatttttcaggaatttgtgaaggaggaatctgaagtcaggtctcgttgtaatgttaaacgttctgctttagaagatgcagttcatgatttggaggagagagctggtaaggggcttgatggtgagattcaagaggaagatttagatggtttgttggttgtatctttagataatctcacttcagcaaagaaggtatactctttctatgctatagacagcctctatgcatcttcagcatcatgtagttgagattcaggttttttcgtttgtgtttctaagaagtttattgttgcatttcccttcattttactgtaggagcttggagcaacgctaagagagatagtctctctgaagcgacagattgacgatgtgccatgccaatctgaactcctccagtatgctcttcttcccccactttcttacttctaagataatatgccttggatttggcactttgtatttgtgtacttgttcgcgttgaaactctttcatctcaacaatttttttgatttaaccccaccactcccactggtttgatgagcaagtatctttgattatgttgtaaaatatatgaatcatcatgtcaggagtcaagttaatttgcgtgtagctttgtggaatccagttttactatggctaatttcccacttggtgtatttatttcacgctaaattccaatatttcattccgtgcagatatgaaagaagattctcagagctgaatgtctgtattcaggttcgaatagtcaaattaatatttgcctcgttgctttgcaggtttgtttcttagttgaaaatgaacttgctagcttgacgaacatttgtttgatatctgactaaaaacaggagaaacttcaacaaactaggaagctctatgcaacatacaatgctcttttagaaatcaaagatttgatgcttaaggagacatcattattgaattccataggttcacaggtaaaatacaggcattattattttgttgattttctataactagcatcatctgctttgtactgttctccacgttgtacctttagttgtcatgtacttatatcgttgagaatagcttatgttcattactaagttgatttacgtctctgctttccccttttagtatatctcttggtgagtcaaagtttcaccataattccgttgacttgattgtagtttcaagacgtgattggtactcctgctggccgtgtgaagcttattgattcaatggaaggagtcatgaaaggaatccaacaggtaatctgagttatattgaatcaggtatttgaggcacaaagcatgaactaacccatcttacctatctatagctgtatgatttgtcataacaaaatgtttaaagtgcagaagattggaaaaatacaacttgggcttcaagaagagcagaggctccgtgatgcttcaaaagaaaagtatatagctgcagctgcagagcaaagaaaatgctacactgtactaagagcataccaggttagcacaagataggaaataagtgtttatactgaaaagcccgagagtcatctacttacgtagtgctaaatttctcaatggcaggaggaatgtactaagaatgagaggctgagaagtcatatatctgccatgaacgaacacctctgactcgaagaagggtttgaataaggtgatatgaagtgactctcctttcgagttacagctaaccagagtagagccagagttgatttagatatgattctcttgtgatgtgatgtatccatatgctcagccttacatggaaatatacgaaaatcgataggcctagaaatagtaggtttggttgaccaatatgtttatatatgagctatgagaaaatattattctctaaatcattgaggagatgagtttgaatacaaacctagaaaggtacagagcattgtacaaagctatcaagtcaacaaataacaacttagaagaagttgaccaaaaacaaaaaaaaaacaaaaaaaacaacaacttagaagaacagccacactcatcgtctctcatattcagactttaatcatgtggcttctttttcaggatctgatctgtgaaccggatctctgatatctcgtccccttgagatgatgcttccttgatgctctctacctgcaaatcatacatgtacatggttttatggctcctcaaacagattcaagttgataaaacccagaacagttgataactctttactgttgtatcctcattttattatgtcacaatgcaaaataagacctgattactctactccactcagtatttgtaagaagctaaccaaaatttctgctgaaatctggttttctttaaaaagaagtcacctggttgtgtaaagatccggtgacaggcactggaggtaggttgatgactcggccttgcacgaaattccgggggcatttgtggtgtttccttagagctgcctccttcatacatttggcctagcttgtatggaccgtcacttgtgttgttcttcgacttcggtttatgagacaaacccgtagaccatgagcctccgcttgatcctgccaaggccattatcacatccgcctgcaaaaaaataacattcatcagatgaacttctcaattctctacctttttagatatcaaaatgtagtcaaataacttgaatatcaagtgtataagtgttagggagaatcaccttgtttgggtgaacgtcatcaaagacatgagcttgaccgccatagaagatggtcatttgcttagtactcgacgccaagtctttccgatttccggtactgcaaatacaaagtgtattgaaatgactcgaagagtatcgaaagaccagagacacaaaacactagaagctaactgactttgaaggggcaaaactttcgagcttgcttgagtttggcattgtaaaagaactcaagataccgggacctttcatccctgttcgtgaaccttcatcagcagctgtctgagcaataactgatgggcctacgttctcatctttgaacctgctagtagacagctgatgaagcaaatgactgatctgtcctcctccgcgtggaggctggtttgccaaaggattcacattcatggagaagcttccaggtccgtttctaagcaactaggttatgacaatgacatattacagaaactgagttctacgtagctgtgaccatggtgaagttgtgtaggttctgttttttttttagttaccttggaccaatgcagagtctctgggtgctcctgagtcgtgaagtgagaatcagagttacttctcttatttcctgaaaaccgattgctcatgattgagccagaaacatcacttcttggtccaaacaattgtatcccatcaagatgattcccaccgccgctgtgtctttcgactaaacaatgataaaatatggataagtaacttaaagattgttgtgggagggaactcaaggagatagagagagaaaacgagaggcaataaagaagggccaattcatataaaaaaggatcacaacctcaaatggctatgacccaccaaactcatcagtcaaattcactctcaatgtcccaactaatccaccagagggcattatggttgggcagagagagagagagagagagagagagagggagagtccttaacactacaagaggtcaagcaaccacatgcccacacacaatccatgttcatgtttcttaaattgtcgaactaaaaaagcaatgaggcaagaaatgaaacaagacaatgtacattcacattttgttcaaccttatgaacccaaagatgttccattttcaacttaagagatctaatcataaatgaattgactaaaaaatttgaaactaactcacatgatctcttacattttcaaatcatggtgaatcaaagctcgatcgttaatccagactagggggaaaagaaagaatccaactttaaatcgaatctatgtaacaaaagttgaactttctatagatagaaaccctaaatgtacagaggaatcagctcaaaacctcatcagcgtaagcacactacgtcaacaacaacaaaaacatcaggagagagagatagagagacagagcagaaccgagatcggaggttgaggagagaccgccgagtccaccggcggaggaagcagaagccgtggaaggagtcatcgccgctttagccgccttattatccggtggtagcctatggtcagccatggaagtggatgctaaagtaggattcttggagcctaaaaagtcatggaacaagagcttatcttgttctgtctgtcggagacgagaatcaatatcagtgggtcgctggccattgttgtggttcaccatcatgaaaccagtgtgtcagtgtggccacttcgccaccacatcctccgttacagtctttctctctgtctctggcagagtattatttcatggacacactcaacgagagagagagagagagatattatcagttttttgttttttgtttttctgggtaagtgtataataaagcttgtctttttcttcttcaagctactttattgggtttctcttacatgattttaattccctttaatattataataatcacatctttcaaataatatatgattaaaagttcagcccaaaagaaaaaagtacgattgtaaaatcatggcattatagactctttttaaattaaggttatcatagattcataatgttattgatttgagaaagtgagtttgtgtatctaatctaaccaacacactataatttggtgtagtagtacaatgttaactactttactcatatgtggttgttagatcgattagttaaataatttttatacacataattttatcattacgcgccaaataatctgttttaaaattaaaatgcaaaatgtatgcatataactttacctaaatatatggttttgagatgagagttgttgaattttgaatgattataagtgtttgatttcttactctaatatgagtaagagagagaactcatgaaccaaccactcatgacgaatttctatactcttaaatgaaatcgattttacaactactcatgacgatttttcccactttaatctagtttaattatggagtatttaagatgtttattgaaaccaccaaattagtattagctgattttttaatcaactagtctccggactgtgattaattgggttgatagaagtataatggtcatttatatgggaattgggaacacgtgttgtttttcttgttcttactacacaaaccttaactagatgtttgtgatatggaggctcaagtatctgggttaacaatagagctaggggtaaactttccagtaggcttatgttcttcccatatgaacataattccttcaacgacaagacatagcacgtgttcttcaaacaacagtagcaggtcaactttagcaacatgtttgctccaagtagctacctgatatatatccacaagaattccaactataaagaaagtactcaatagatattaaaaatcgaggctcttcaggagtaccattcatgaataacataacagggtgagtttttccaaacgattcttgagagcatcagcggtagatacaggctgagctcggtcttgtccagaagctttcgcattcttcttaacagtttcaagaatcgttggccctgcagccaaccctaagcttgcaggagtaatagaaccagcaactttgccaactttattagctaaacttgatggatctgccccttcaagtgtatccacagttttgccatccttcaataagaaaaggattcagtgcagtgacaaagattcaagctttgtcaataagccaaaaaattgcaaccaaacaaagaatcaatatgcctaaagtttaccttgaagaagacgaaatacggcacaagagcaacagaataagcctcagatatctcaggatgttcctcagcttctacctaagaagataaataaaaccaatcaaagtcaaaaaccaattgaaagagataaaattcgaacagagacgacgaaccctaaagaagtgagcacgagggaaatcagtagcgagatgagagaaaacttgatccatctgcttcg

SEQ ID NO: 659 - DNA, 101715 bp, Arabidopsis thaliana
gaattcatcaaactggaatctaagagaacgaatacacgaaaatatgttgacagttgtatatacccacatcaatactttcttttgattgtgtgttattgtatttccaatcaaattctacaagattttgctgataatcgtttttttttgcttcttctattaaagttggattgtacttccacgtgttttatttcctcgggaacaataattttttcgaatttgcgtatcattagattttaattctatatatgtgaatataattaactatcttcgaatgtaataaactataactaaacgacaaaaaaaagactacaactaaatacgaaaacaggaaaattgtgttccaagacagaaaattttagtaaataaacattactaatcatatatatgaaagttggccaactctcaccaaatgattaacacatcatcactttagcatttgccatgtgtctactaagtaattaatgtaagttcttcaacttctaatttataagttaatgatatatttattatttaattttacatatttaattatagtattactaagtttattttaatattacataatttttcaataaaacaattttaatagttttctcatactcaaagatttttttttgtaatccaaactcaaaatacgagtatataatagtcttggattacttaatgatttgagtaagttattctcttaaattgatatttatattctcttaaattgatatttatacaataaatcactgagagtgaagattacgtaaggagctccatcatcaaattcttaggtttctagaatccaaaactaccctctgttaagttggtttaatacaaacgttatttatgaattatgtgtatgatgcattgttgagaatgttgttagaaaaaatatttttgaaactaaaaataattgtttattgcatgagtaaataattagataaataaaaattatatttaaattaaacaatacgaaaaaatccgaaaaaaccgcggcgtagcgcgggtgatcacctagtacattaaatattaaatagaatgagaactttcttaaacaaacatatgtcgtaaagttgacactgatattcaattattcaaaagttgacaactgaatttaaaagtaactatatactatgttaaaactagattaaatcagtgtggcctcagaattggaatgatagaatgagacctcaagtatgagccctgcatatatacagaatgctaacgaaagaaagccatgcattgagacgagtttatttttgaggttctttctgcttacctttccgccttcaggcccaaaattattaatcaattttaacagcaccttacgtttgaagagttgccttgtttttcaccattagttaaagaggatttgagcatcttggtgatcatgaatttggatgtatatatttacgattatgtggtcctctttagaaataatttgtgcaagatgatggttacaagcaatacctatctggtccaaaatagggttctggctttaacgtaggacacaatatacacaaaaagatattccattttcgatattaaaaaaaaccatgcagaccaaccaaagtaactgcatagtcatacgtatctttttaagccattgaaaagtatgccatctttatattgtgtccgacaaatttttgtcgtcgactatccacaagtcaattattgtatgcgttctttttagaaagatgaataaaaatcgaagattctttaagctcatttcgctattttgggtcctaatgatcgatccctttctaccggcaacatgaagttgatgattatatgcttgtttgccatttacgatgaaaatcttttgaaaaggttaattcacagaagtggagcataacaatattgactcggacgtgtttcttgttgtgggaacacgaaaaaaacgttgttgaagttcaagtgctgtaatttaagtatagacattgttggagataatctgaagaagatcaaagctctcaagtatatctaaggaatctgaaaaatgtaaagtgattggcgtctgtgtaagatttggtggttaagtggtttatagtgtataacctgcaactagatatcaattgcgagttttgcaacctgcttttttgctatattaacgaatgaatctctgttagttacttgttctacagtcacaaacctactctgtggttttaaatttgaaaaactctattgtaccaaatggagtgaagtatcatatgaaatatatcgaatctctcaggtttagaatgccaaaggaaatgcttctgcaccatcttgactctcatctgcatctctctatacctttcctcagttatggacactaatatgttcttcaaatcaggaatatctttctccaagacaaataccgcaaaagactcccaattcagaacttcgaagaagggaggtacaaagttatcggatatgataaccgggacacactcatagaacaatgcctccacgacccgagggctattgacttcgtgcccttttgggcagatgcaatacttgctgctcttcatgtactccatgtaactctttttccctttagatttgggtatctcactgaatattttcatgtctggatctctgtttcctccccagttttgcaataggagaggtctaaggtaaccgtgcattccgcctgcaaagaaggcaagtatttgcctttgtgaaacaggtttgcctccgagagccctaagcggtctcctaggaacaagaatagtcgtctcaggaagagctacatctttaccgaacacaaaaccttctgaaacatcagaattgcataatgctctgatgcacttggccatgtactgcctcgtctcggaaggagcctgaaagcatggttaacaaacaaagagaaagtggatcaaatgggtttcatcgagatcacaaaacagtgacatagtagataaagtagaatttttacccagtcgtggcaagcaaccagaaaatgatctgatcctccagttttattccagaaactatatttggaagaaatcatgtccaggtagttcttcaaaaactgaatgagattcttatcgctgtgagaacctgggacatacagagtttcttccaacattttggagctgaaaggaagataaaataggtgagctttacgagggtcttttgtgacaaatgttctgctggacttgagttgtttcataaaccatccttcagaagcatatattcctttcagcaccggcttatgcagtacaggtcttttgccttccctgtagacatataccttgagctttttctccattagctcatagctcctgcaatgtgaaaaaatatagaaaaagagacatgactcagctagacaaaactcataccaatatgaccaaagacagaaatcatcataacagaggagtataaaaatcttcacaactgaaaatactaaacagagattaaagatccaaagaaacaattagacaaaaaaagctgagccacataaggaatactgtagcatctctactgaagtaaagtttaaaataagtaaaaagtgcgtttcttgtgatcatggtctatctatatctagtaggattctgtaattagtgataacattctcagttggaagagcagaaccaaagctatgcctagatataggagaaagcaatcgaaatgcgtagagccattataaaccttttgaacatggagagattccaatacagaggagtatgcagtaaagggtcgttctctatcagcggtgggttctcaatttgagttcttgcatataacagctcatgatcaattgtggaagaccgttttactttctgcagaaaaaatacaagaatacacaaataataagctacaaaggtgtactagtataaacaagagcattggttgtctaatcagagactaaaaacacataccagtgagacatgagaagtgcggctttgatgcagtaaattcatcatctcagtgatagaaaccaccccagaatttgaaacattcataaactttttcacctctgaggaaagattatcaacagaaggatcagacttactctccagaatctccattttcctaatattttcaaaagcaatatcagcatcttctactattttctcgtaactctcgtttgagctgctcttggttcctggaagcaaatcaagagtttccttatctttgacatcctctacgaaactatcatggccttgaactgtgtcattcttatcaaagccaatcacatggtcttcttttaaaccggtgctttcctcttcatctacctcaacggatcttgaactactagaattcaatctttcaggaccggacaacgtgcttacgggttctgtgcttacatcaattgatactggaaacttatcttgagaagataaagagaatatatcaccaccataataacgtatgttcacaaactggaaggttgtgataaaaatgaaaacaagaccagcaaatcttaacaatttcattgctttctgactcctaaacttagccactaggttctgctggtggcaaacgtatactaaatgttctcgtagccacaaattcaacatgtagactccatgaaacaactcaatatcaccatcttaacgaatgatctgcaggatagaataaaaaacagagaattgaattcaaacacacgaattggatgttacaactgaattttactgtaatggatcttacatctgagacatcaattaatcttatttttttctatgctaggacaaatctatcacccattggtcgggaaattggaagcgacaagaagcaaacggagctgaatcgaaacaaattaaattaagaaaacgcgaatcctgctaagttttggttctctcaagtaaaagaaaattgattcggaaacatgaaaagggagatcttgaattgacccatgaacttgtaagatacaatacaagactgaagtagaagataactcaaatttatttgtaaagcaattctatcctaaattgaactcgaattactgcagtagagtgggaagatatattaccgataaatgttacataactcgcatgaaccggatttgattatcagaagttcaatcgtttccgagaattttccaccggaaggacgaagaactccatttgactgatagagggaattttttaagttctaattttcttatatttgttttcctttttaagaaagaaataaaaactcagaaatccagctgtaaatcgataaagtgagaaagacgggaaataataaatgtcgttagtgtgacaaataaatatcaatgtcaaatattattacaccagacacaaacatacattcttcaacacacgtgaaatcgaaaaaaaaaatcaatcgttattacatgatgttcaaatgtgaaatagtgttttaatttgatcctaactctaatgtttccattgaacactagaaccgatttcgagtgagttaagcaactgttgaatcccctctatccacatttgcttctctcttttgtttccacattcgaattcaatcaccctttccactgttttcaccccaaagtaggctcttcgctctaccattttatctgctcgtcctctatgtgcccattcgggtatatctcggcacactccattgacaacgcctgcatccaaataaaccgccaagggaatgttggtttgtacaaggtaattaagaagactatcaactttggtattcactaattcgctagaaacttgtgtcatgtaagcttacatttcttcgtcttcgtgaaagttccacccacatgtttgctcttcattttaagaaccacctatttcaaaatcaagagcctatgagtatgaggaacatcatatatatcatttttttatgaaagttcttaaaaaaaaaaaaaaaaaacttacttgccaattggaattgatgttaaaagatacttgcttccaatgaagatcccctgtcaccaaatatcctcggaaacttaaccctgacagattcatcacatgatcaaaacggtgttttcttggagcacaagttacctttgcgggtgcgtttgagaagctcttctcctctagagacgaaagtcatcgctccaaatacatttctctcttccatttctacgacgtgctcctttgttgcatatagcattgctttgttctcgttgttcctttccattcgtgaccttagaatcgcagctcctcgcaacgctaaaatctctcaacaaaacctcaaaatcacatatggggtatcatttgaaagcggtagactatgcgagaaaacaataaatgatacctgttgcagcacttgccgttaaagccataatgtctccgttagtcctagcattggtcgcggagctaacagccgtggcaatctggttataacccgccccaatctctcccgctatctcgatgcaatgtgaagcgatgagagcagctgcagatgccattgcagctgcaacggttgttgattcaaccgcatcttctgcggccgcaatagcgttagatgctgcggttgcggcaacaactgcagctactcctgcgacagagaccgcggcgtgaatctcagcgttgcgagttctggtctcttgtttcttcttctccttctgatcctttaatcttcttcccattgttcttcctcttatcatgctcttgtacaaatgctgtatcattcacaacgattttattcatatttgctcatatgttttgattctcataatatatcatctagtaatagtcacttggcgaggagtagtctaattgactagtatatattattatattctccagacataacatattaatccgaatctaaaaatccaataaaactagaaccgaattcatgtaacgggtagatctagccaaattgatgtttgacattatatttgagttttctcaaatgaagtccttctttttgtcagcaattatttcgaacgtaaaaaaaagttaaccatagaatttccgctcattgcacattactcactgtgttaccctttttattatttcaaaaagaaaaggatatggattgaataaacaattgcatgatttcatcatgacaattataatgctttctcttttctctcggttaatttttataatcaacgaaaaagttccgaaaccaaccagctttttttcattctttacgtcgactccttttaataaagatatgatttgatttgagacaatgataaaccggaaaccccccggtttaatagatcatatataccttcatttctctaccggttcttggagttattggagggctggtcttatttcccacatgtggcagcagctgaaaaatggaatcagaattgtaaattttctgttctttttcttgtagcattgaaaatgaaagtgtaaattaatatttaagtaataaaacctataacaaaagttacgctttaggtaaaatcgatttagttctttaataacactcaacaacaagtcagcaacaaaccaaaaaaaataatacataaacctcacataaaagttttcatgcgcaaagtttagttacttttacccaaaaacaaattaaaaataaacttgagcggccgtgtgataaaacagaagggaaaatatgcagaataaatagcaatttacaattttaattaagtaggtagaaatttcgttaaattgctataagcaaataatagaaaaaagcttagataaactcattcttcacgtcgtacattttaaaagatgttcatttagtatcatagtaggtttatatactcaagttttatactagtgcatgttgccatctagtagaatttttcataactaaacaaatagtgttcagaaaataggaagagagtagacttacaaggtcacgagaagaagccatggaagtagaatcttcttcatcttctctgtcttctttgttggtgttaacgatagtagatagaagaaaagagttagtgtcggcagtggaattgttgaaaaaagctctcgtgagttcgacggcggaaatgctccatgatctccccaagaactccatcatctccgttggcgtctccggtggtaacgccgtcctcacttcacgtgccaccgtcgatggaccttcttcgtctatgttttctagttttttccatgaattgtctcttcccgtgtggcacatcatgactaacaaaatcacacatccactattaatttgaccgattaacgtaatcaattaagggaaagaaaaaaagaacttacgttgatctaaagtagtgggattttgtgtgaagagggttttgtgcaagcttgtcattgttgatagagatttgattggagaagaatcactatgtgactttggctatatatgaaaattgattcctcttttattttttcgtacacttcaaagtaatttacgttttttgttttgttaataactaatacataaagaaacattataaaatacagtttggtcaagttttatcttctttaataaaggttttattgtatatttatgatatagaaactttttattttaactaaaatgctacaaaaagtctttcttagcttaggagataattcatgatcactaacatcatcaactctattaagatcattctactcccaaaactttaactcatgtattaataagtttaaaaacataacatgataaataataaaacagagatagaagctcacaactcacaagtagaaaaaaaaaaaatatgttaacgatttactttgcttttttctttgttttctttcgactgcctcgaatgggtttcgcgggtttaaatatatataaaacaaaatgatggttttgccatttgtgtcctaattattgcctaaattgaagctttgttggaaaaaaaatgctgctttaagttcatatatagatcttaactctttattaggaaaacaaaattaccaaatgtttttatattttagaagtgagaaaatgtttatacatatatatgagtgtaacggaaagaagggtttatttatgtgaggaagaataaaagtaagattgtgggagccagagagagtgcatttgtaatgatgctaagacaaagtgagccgatattaaggaacttcttcttttctcctttttgcctcccactcatagttatacaatatccaacaattcgaacctatatcattaccaatccattatagatcgtggtttctacctaggaacaatgagtggagaaacaaaaaataaaatagaagaaatacctaaaaagtaaaaatgaaattctgatgcaatttgaaattgaaattatgcgactcaaggcttttattgaactagactttacactggcccgtatcatttaccacaaggaccgaacgaactaaaatcatacatacataatagtgaagctagcaatgacatgactaaggcttcattcatcacatgggtctctatcaacaaacaaaacactcatcaatgttacagacccggtggcttgaagaaagggaccaaacctaaggcgctttcaagatccaatgggacctgaagagcctgttttagtagctcgggcgtgttgctcgtatctcctttccatgtcccaaaccacggtcctcctcctatctccactgctgccattgagctctttgtctctaatatcacctgcatcattgttaaccataacaaacgttcataatcttctttcactgccttaggatttgttaagacttttaactacagggattggatcacattagcatacataccttgcctttacttccatcatatagccgttcccatatctgcaacttcaattcaccgtaacaactatctctgcaagccgtagctagcccaacttctgtggtaggagcacgcagaggtgtacccgcttcatttgttcttgcctctagttccacctgtcacaagacattcatcgggtgttggaatctagccataagggaatgatatgatgtcaaaagtaaaactgaatgaaactagtaaaacaaatttaccacatggttttcgttctctgcagttatataccaataaccccagggagacatttcccatctaacaacaccattccaaggaacaaactcgtacatttttccatcatagtgtacacaaacctgcagatttacaagggcccagagcttttgtaaactatctgccttctaatactcactgtcattgcttaagaagatcttataagtgcataccagtgcagcattttcataggtctcagtcaatccaggcaattgcctcaacccgccacctgcggttaaagcaacttctccagttgccccttcaaagacattacactggacctgtaaagagacattgacaaataaagctatcaaacaagtatactacatgtgggtgtatacacaggtccactagctaactaaagtctgcaacaagaaatgtagcaaaaggatgaaatgttttacccaaaaccattttcttgggaagcctccaccccaattcttctctgaataagaaggtgcatcccgaaactcaaacctttcaccgccccattctatccaccctgcaaatacaagagaaaaaataagaactacaatagcagtttctgctgatagaaagagggtggtttctttcttaattttctgttagtactaggcaagtaaacttaaccgtctatttattaactttaagtcaatcaagcaaagctcacacctgtggaaaggcctcctgccatgcatatctgccaatgaggctcaaatacaggaaaagctgcaggccagcctgcagttgacttctgtttggccccaacatcaccccaaccgtaaacgggacgagtactatactcccaacgagcagatttcacagtttccgcatagtcagtactgacaaaacaagtcaagtcagatttaaacacagaaattttcaacaaaaatactcaatatccaatatttataatatagtgaattcttgttgtgcatagaatcatataattaccggccatcatcgcaaatgtgaccttgatgccaaaatggagtagcttggaacccttcggacactcttctgttaaattcctacaataaaacgacatgctttacaaatcaacatccaagagaatagcaagagtaacaaaaacttgagattttctacaaggagaagtagaacactatccggatacaattggaaaactatttaacagataacaaagtaaccaacaagggaggagtgagaacctctggtggaacctccttgtttggagcctttgcgcctggcacagcactaaaagtattccccaaaactagctcatgtcgatctatgcatgagtaaaaactttaggtaagcaatctttaaagtcatatatacaaattcatgttgagaaagcaccagaaccaaaatgtaacaaaattcagataagacttagatctttaacaacaataacgaacattagtactagaagtagagaaaagactcagatatgatttcttattgtcatgacacagcattttaagggtcaaggagttacctccccagaaattgtgagagtcttgttcgtattggcataaatatttatcattagcgccaagaatctgagctccaacaccagtgaatctaggtccatatagagccacttccaatggtgacaaactctgccgaaatgcaggattctccacagaatacataaaacaaaaactctccctcttctctgggatggaaaccctgaaataccatccctcgaagaacttccgaggtgttccatcgaaatggtatctgcatttttcaaaagttaaacaataagttatcaaccataaaaaaaaaaactctctgatgttaaattgcatttttcaaaaactcaaattcaaaagtagtcgtcgaatggtgagccaccaaatgaataaaaataaaatcttacaactttgtaatactcaaaacatactgaagcatttaaaggagcaattttttaagtcccactgatcgtaagaagaacatataaattaaaagacgaaactgaaattggagcttaataaaacaaacaagagaagagaaatggaatggaatggatcaatttacccactgtgaggagtccggagttcgcgattgggagacgtcgggacgtaaacaggtttaacggagatcttgtcagtttcactattcggggtggagatcgacgccgaaaccctagaaatggagcggggaactagtttagtcgatcggaacggaactagtgagcgagtgagaggagatacagggcgagagagctcaaaggaagataaattagggttcatagaaacaatcaagctccgtatctccataatggaagaagaagaagaaatatgcaaaagaatgtgaaattgtgtgtttggtgttggtggtgacaaactctgtgaagaatgcagagaggaagaagaaaaggacgagaacgtgtggcggtaagtagttacgtggcaaaccccaaacgtaacgtatttttattttgttaaattaacaatttctcgtgtcttgttttcagtaatttacggaaatttattagagacaacatttcacaaacagacgtgaggagaatctctacaattttaattgaaatcgtattttgagatttttttcccttttaaaatatttacaaaaattctgaagagagctgaaaagaaaacaaaatagaatacgtcaacagcaggattcgaacctgcgcgggcaaagcccaattgatttcgagtcaatctccttaaccactcggacatattgacaattttgttagacagactcttatacaaattaatatatgcacgatccaaaagactgatgatgatgaatggactagatttactcttcttcatttgtctcttgtttctttctgttagactagatttcaaaaacccaaacgaatggcaggtttttcttgtttacgacgagcaacataagaactaacaacagtcgcaaacaaaacaaatccttcctttctactttttcggtaattgacatcattgagtcgaaagagattatataatgcaagcatagtttgacattttgatgtctccattgactatggaattagggttgcaatcatatacaaagaacataaactgtccttttggcaaatttaagaaccataactctcatccaattgatatcaaactttattgccaatggatataacaaataaaaggtctgaaaatacaaatgagagattaaaatgtcctaaaatagaatctcgagacaaaccccaaatcgctgagttctcaacaaaagattttccagttttcttttctctacaagaaatatacaaacccataaccaacggtaaattataaggaagaacataacacatatgtatatctatgttatctcccaagagggtaataaaatcaatgatgaaaaaagcttaacaaagagaagaaagagagttagctgaggaggatagaggagatgaatactggtaaatgatgaatggatggaggaattttcacatggtaccagctcttccggaagtcggttttgtaggcttgaatttggagatgtccacaagatccccaaatagcttgtcctctggtttattcttaggtttcattggaggcagataagatgtggtagatgatgatgatgctacctgatgcgatgtctggtctctcatggataaaccgtacatttgctggtccagatatgggctgcttccttgttgctgttgattatagccatatccgtatcctcccatctggtttccatacgcctgttgctgttgttgttgctgtagctgttgctgttgggcatagtactgagccatcatcatctgctgctgctgttgttgctgtggttgatagcctgacccaagagcctgatttggttggtttggcatgtacacgccgttttgtggaatttgaggatatggactgatgttggcaactgcttgacctgtttggggcatttgagcatatggactgttattgttgactggtggcccggtttggggaatttgaggatatggattgttgttgttaactggttgagcatgtgtgaaggcagtctgagttggatgcattccaggagaaaacggacttcctgactccgcagagggactatagtcttggagctgagcttcccatgggggaggtggaaatgccgtactgtcttgggcaccttctttatattacaagattaccataaaaacagaacaattaatgattagacatgagacacaattgaagctgattcttctgaatccaaaagaaggaaattctttctccttgttgccataaccagagaaacattggcatactgcaatctaatctccagatgtgtgaaaaacaaaaactgtttatatatattaccataagatggctggactggttgctgtgcaggctgactgctccagggagaagagactccttgcccgtatgatggctgctcaaactgcgaataacccacttgaggcgcaaatccattggattgttgtaatccagcttctccagcttgactatttggttgttggtgcccttgaggattcaaaggaatattctgagctggattgccacttggtgcagttgcaggacttggattattagtattatctgagaacatgtcgataagggcgagtgcattttgatctgatgcaaccggacttgctggctgaggaggtccaacaggaacaagggcaagatcatcgccactgaggaggtctattttggaattggctgaaccattagttacaggtggtgcagggagggccaactgatttagaaccccgttaccagagctcgatgtagctctgtgaaaacgttggacagtataaatcaatagctatgttataagacaaaaaaaaaacttttacaaggtcacttggcctgaaaccccagttcttacttggttaagagacaaattaacaccgtttatattaaaatgattataaagttactcccagattcataagtaacttttcgttttcacatcctagattgtaatagtttggacgtgcaagccatatatcgagctcaagattgcagctaggatcggtaacccatatccaaaaataggtgattttatccaacattcttgggtgcataacagtcaagtttggtagaacgtacccgttcgcctgattactgctgtcccctgtatcaataagtggaccatcaacatcaacaagggattttcctgtctcggacttgggcttctcgatctgagaagaagttccaggtaatccagaagcaattgcttcataattggttaagacacgctgcaagtcatcattcaaagccagaccttgacataacaaagactcgtccctgaaaaacaaagttgcgaggtaaagaagagtacaaagaaacataaggtctgaagcataatagcaattctaactgtattattccacacgatactatctgaaacgtgaagtaagtagcagcattaactcagacaagtacggatttcagataattcttaatgaagtcctctccccaccctcgtccataataaaccaaaacccacacaaaacacgaatcatttcctgctgaatctagtggtactatgtatgcatattagaagatgagaataaaaaaaaaaatcgtctcgtaccccaagaaatataacttatatgagacatgaaagagataatcaaatggaaccgaagaggaaaataaagagctcttacgaagtcgagttgacgaggtgcaccactctttgtttgtatgtacgacactgctccaccagatcgaccataacctcttgtttgagatcctgaataaatccaaaaacgagaagaatgatcattatttagtatattttgggctatagcctacacttgtaaacaggtagctcaaacactctgcaactaaatcgtgttacctccttgtttccgggctctaatgcactcagcatctccgcaagcacatccatgataccttttgcattttgaatctccgacaaactgaaaaagaatttgacatacagcagaataaaattttgagaagcaataaatactgagcaacaaaggcatacatatacgtcctaaacaaagcaagcaaacagacacaaagttaaaactagcagaccctagtgaacatgcctattaagtcttacaagaaaaaattgaaactccgttactgcaaatgcgtgcatttttcaaaagctagaaggcttttgcttaagtgtgattattttcttgattcctctttacttcgattcatcctatatataggcttccaactagggaaggacgttgaacaaaaagtagctaaacatatattacgacaatttgttagatatagcaaggacgttgaaattttcccaacaaaatattgtatgcttttgttaaaaatttatgaacttaaaactgcggagttgcaacagaagatatctaccttagagtcggaaattctggctctgctgaaggttcaggcacatcattaccaggtccagcgttacgaagatttggagggtaagatgtcaaaggctgtgtttgaggaggtgtgaacacaggagctgatctctctgatctctgagggaaaacagcaccagcacgctgaaagggacatgagtcactggtggttaggcaagagtagtagaagattttctaacagaactcacaaaaggatctaagaagaattcattatgagatgtaataaaatttcagtatgagacatctggacacccagaatcagaaacactactctactgaaggaaaaaaaaatgaaacccaaaataagtatatcaaacaactaaattatgtagacataccaacaattcctggtatcctgcatagtattgtggatatcttgccctagggccaccaaaggcctcttgccatgtatcgataaggaccagaatcttctctttgacatggaagtccggctatatgcatcagaccaattaggattagagaggcagagcaagggagagagaaagagagaccaatttggaagaaccattaccttcttcttaactatccggaccatctcatgaataacacctttctcagccacatgcatatgaaccatgtcaccacagttcttcactattgtctcaagcagctagaacataacaaaaagcatgacgatgagtgaataactatcattgcaaaacaaacaagaaagatgaaaaaacgtgaaaataattatcagcatatcattcttgttagaaaacttgtaagtcattaaaatcctcatcatgtacattagtatcatgaacaagtaatctctgatcatgtcaacttccactaataaaagaggtttgtgaaacaaacacgctatccaaatgcaccgtttcagaaacaacagtggctatttcaatgaagtagccatcaaggaaaataaaaaggagagacagttatctaggagctcacagttaaggcaagaagctgagcttttggattcctgctaccaatccgttttttaatgcctttcacaacatcttttgcttgcctacaaaacaggaaccagtttcagacatcacatagtattggtgcagttagtacacacactgaaatctccttcttccaatcacaaagcatataaagaaaataacttgagagcttctacaattaaagccctatgaaagatgactaaattgagcaaaacagtaggccacaagtattccaattggtcctagaaaacatggaaatatctaactctggtaaagaaacgaaatttgatttccatcttactgttaactctctctctctctctctcactgaaccaaaaatccaaatccgtatagagagttacaatagtttacaggagactaatcgagaagtatagaaaacaaaaggtagagagagagagagagataacaacaaaaacaaaatcggagggagcagagggaaacatacgctggatcgctattgagcatatcacagatctcgaggttcatagcccaatcaggcccgatcagcatctcgctcgtcgctctctccaccatagcgttcaccatcttcgctttgacccccaaacagaaaaacaattaacctccgattgaaagagagagacgaattttgaaaccaacgaatcaggcgaagacgaattaagcagccggtaagatcacgcaaagagattactccggcgaagaatctctcgctcaggaattcacgcccttctctctttctactagaaatcttttttttttccttttcttttctttttctctaattgttaattttcagaatttgttttttaaaaatgtattttctgtacttcagatcattttttattttccacgaaatagcaaaaaaggaaataagtcgaatatcttctggaaaagggtccactaaaagattgccacgtgttcatatcgttgtgtttggatagttacaccaattcagtcaggtcattgctttccatcggaccgttgcttttgacccacctataaatccgacggtcatcgtttcactaacagtaaatgttagttattagtattattattttttcgtttttgggagctaaatataataatgttatccaatctaaatgaatgaattagatttagatggaacattacagtttgatgattggtcgattctcaacagcttacaatgttttctttttaatgatcgaaacaaagtatttgcaaaacaaaactaaccagcgattacgattgcgattgcacacgtatgcaattaattatgagtgtcatttgataacgctatgaaaccgttaaatccacatctttacaaaattcatcataaagaaaacattttggtcttatgaaagtcgtgattggtgtgatacaaacctaaaccaacttgctacacatctatttactctctattctattctattgagttctcgtttctttatcactttctgtgttggatgtattcacccacttgcaaaaaataatttagatttatagacatcaaaattgcataagagtgttagttctaacttcatcagttgaattaattaggactctatagctaagcatattctaattctatgattatgataataattgagcgggaagtggggatagattcgaactttaacaaactattgggggtcaaactgtaattacacagaagttatcaaagcaagtacctttacacgcgcctaattgtttctgcatcactaatacttcttcctcatttccccagttcggtgttcattgatttagggttcctgataaacttcggaaacccctattttgaattgtttcggaattatctggtgagaagggtctaattcgattgtggattagttttttttttgtgtttcttcaatggcgatcattggagatgcgttgcgtcaagcgtttatgccaaagcaagagtacgagagccttagggaagaagatagagcctggattaagcttcagaggccgactttagtctcgatcgtggctttcctttgttttgtcatcttcacttgcacgatcgtcagcttgaaaattgtatttccttcgaatgttcttaagaggccattttgcagcgacataaagctacaacctttgcctatctatggcaaagctcgtgactccgatctctttcccggtgctttttacttgaccgatcaagaaactgttgattattactggatggtcgttttcgttccctcgactataattttccttgtatcatctgtttatcttgtagcaggtgagcgtcaagtctctagcttttgttcttcgttatttcatatctacagagctgggtttgcatttgtgttttgttggctgatttcattagatgatgctcagttctgagtggctttacgctagatattgatgcttagcaaatttctggcaaaatggcttctgaatttttcgattggtgaggtgaaatattgtcagagagggttgattgattgatgtgtcctcaaaatctgaatgctcgttgttatgtttagttctagaatcactcgttttgattgaagccactatataaagacaggtctgatgatggttcaggtttattgggattttagggggttagccatagagcaagctgtggagtttgctaaatccagttaattcctctgctagattttgttggatttgaattttatatggatgtaacttagtggagctgatttatttcctttattgctttctgcctccacatggcagcccttctaagttttacaggtgtggtatgtctgctgcttattattctcgctattttgttgcaatactgcaggaatttttgtggcttattccgctcctcaccgtcatgggtttctaaaagtcgttgaaaataactactgtgcttcaagaagaggtatactctcttctctctttaatatgtattcagctttccatatttgttctttgtatatccatgcattcgtgtaatagattcattccttttcagtgccagactttatcttataaatttttatgtgtaattctatttcatctgctagtaattactatgtttctacctttgagaatctgggctcttcagagtttatcactaagcttggacctcaaaataggttattgatcttctttatcatgtccaataaattcacaggtggggtccgttgtctgtcaattctgaatgttgtgtttgctatcatctatggtctccttgctatatttctcggctcaagcctcctcacattaggaagcagctgttctgtgcctttgttttggtgctacgagatttcttcatggggtttagtaatcttgtatgctggaactgctttctcccttagaagaagagctgctttaactattgacgaaggagagtttgggaacagaaatgatcagggcttggagatgcttgaagctaatccgttggaattcacaccagacgttgaaagacgagtgaacgaggggtttaaagcatggatgggaccatctttattatcatctgatgaagaagaagacgaacctgacttttacaatgaagtgccgaatgtaactcatactctttcaagcaggcaaagatcttgattcttgcaaagaagaatttggtatgacacttatgcaaacctccaaagatgattgcttcagagattgggctcaccaaattgttccctcagtgattctcgggttatttcatgtctctgctttctgctgatgttgtttatggacggatcatgagaagattttgatccggaagataaatcagaacggttaggactgttgctgttgtagatatacacatagtggatcaatcaagattgtgtttggttctgtcttttgagcagttcatggtcggttttgatcgtttacattgttcattgtaggaatcttgggtttgtagtataggcctaacaatacattttgattgtacaataacctttagatcaacagtaatagcatcataaaaggattagtattaacttccaagtcctataaaagaagaatctgtgtctacacaatatcataatacaaactttgctggtttttaatggttttatgaatcagtatcatacctgaacattgtgaaaaattcttagcatttaacagaacaagaagaaaatcacttggttcatcatgaggacgagaacttttggagttacaagttaattacttgagaacaagttactttttcgctatttaatcaatggtatgatgtccagagttgagagatctacacatttaaaaaaattagaaacaagaaaattggacaaggagggaataaaaaagacatacacatatgggatcaaaaaattgaaggcgagactcccttcagaactctatgaacaaaaccacccttctctatctgcaactcttcaaaaggtaagatgatgggcttgagtagcctcccggagaagccgaaggtaccttagctttccctggtgtcccacaatcgctgaagtctaaggcgcgacactccacctgcattccacagagaattggttcacagtacgtcaatttataaactcaaaactgttattccttttaatctaccaagttcaagatccaatttcaacattaagctagaccaggtgtattgattagaggacttgatcaatttgaaacttattgagagtttgtatgatatataaggtgtaagttgaagctgaaacctgggatcggttcccaagctgatcatgaggctggtgctgattttctttcccttgaatggacttgttcagctgtctcttcttgagtatcgattcaggtgtgtcattacccagaacttccaaggcatctgcatatgccgtagctgagtgttcactcaaatgcttcatcagtcctatggcatcataacttctctcgccgggactcataaaacacccaatatcctgggaagaaaaaatgataaacaacaaagaagatacgtccattaacaggcgcttcaacttaaaacaaaaagtaaaacatccagaaactaaatttattccatctcatatttacctcaaatgtgatttctggaggcaactttggactttgcaagaaagaaccaaagagtaaaggagatttccaaggtgatggggtatcaaggagttttctgaacggagttccatcaaatctggaaaacgagttgtaccaagacaacttaggttagaactttcgagctaatatgattcaatagcaaaatgagctatcaaacacatacagaggaaaagtaaaacttacatgttgaagttttcaatatcaaagctggtctctgcagtgttagttttatcgattgcagataaaggaatagagtccactgtgcatagaggttctgatgacatttcttctgttggaaaatcacctaatgatattttgtgctggtttgatagatctttcgcacttgcattaactttgttatctggtctagctcgagtcataccaggagaacacagtcgtaactcaaaaaaacttccagaagtttcttggtcctggtacaagggcaagtaagagatttagagattaaagcttataagattacgttatggagatttagaccaactataaaactataatcctctacaaagacagctgaaataactagatgctatctgtttgagcaaatgtgattgatacgatctcacatgaagagaattcaacatactagatgatgtgttaagcaacaagaagttcactaatagactcaataaccatgtaccagacattgcaccttacagctatagacatcagagaatgagatgactgggattttataactgataccagataatatgcaaggacaaagacggacttacatttttagctgaagcaccaccgtcattacatccattttcattttgcatagaagtcactccacctgattctaaggtttcctttggttcctcatctatcggaatcatttcttgatataaccgagctgatgcacaatttctgttatctctggctatggaaggggaggcacatatatttttatcttcaggagactctgacggacgagaggtcatgcaatcatctccttcatcaagcattacatctaagcgcgaaaaatcattagccaaggaggaagtcgcagcccttttaagctttttgtcttttcttctatcaagcacaggtgaaagcaagtctcgatgccgcttctttaagatggatggtgcaccactaaaacttttggcagtatcattaagcatgacatcagggctcctatcgtgacacggtgaatcccataaccttaacggagttgtacaattcattgaagaaatcatcaactgacggataccaaagggactgtactcttgccgtaagtcactatttgatggtacaagatcacagctgaagaaaggaatatctgcacttggaaaacgtggaggttcataacaaagagctcctttgtctttttcagccggcttatcgtcaataggaaaataaatcttgttcactctagaaggagaagaaaaactattcaaaggtactagcttcaaagaatccttgggaatatatgacagcccctgttgttctgggaaaccaccattatcatcattgccatgggaagttacatgtccgtaagtatcgatgaaaccgtcatttgtatcagtcttacattctaattcggtagctccaaaaaggcgacaaccttgtataggagcgttggaatcattacggggtaaaagtgagtccttcaagtctgaatccaacaaagggacacaattatgacccgccaggccctcagaacttgaaggatgccacggtaaagctggaacttttccagtttcatgagcatgggtttctgcagcctgagaacaaagagatcctttgccgttttgagggtcaaccatattccgaccttgctcaccagaagatgtactgctatctttcatgttatctggaaaaagaaccctacaacactcctcatccgtgatcaaagtttgagcttctggatctgtgtccgagtttgacaaaaaaggttgatcacttaatcttactgaactttgaaaatcttgttgaagtgcttggttttttccaccgttgtccatgttatgggtcaataactctagaccacggtcctgtttagcatcattagatacacccggcaattgatcctccgtagctgtggtagttcttagctcgtgagaacaattaagattctgaaacttcttcgaacattctgtttcacaagaaatttcggggacaacaattttgacatctttaaaggaagggtagtacggttctgcatgagatgcagcgtttgagatttgctgctccgttcctgaatgaaattcaggcatgtaatattcctcatttccacgttgaacttcatcttgtaaatcgttggttgattgtgagaaaacagttgaagcttggctgcattctgattcctcagcatcaacccctggccttgaactaccttcatctccattgctgtgcatccacgaggaagatgaagcgatagatttgttctgaagggcaattaatggcgagctttgacactgatctaaaagacctgatgcatagtaggaatccaacttcttcttaactgagctgttccaatgattttttatcgaattatctgacctacaggaacgtaagaaaaaataagcaaatcaccaaagcaggaacgatagaccacaactaccagcatcaaaaacctattatttcatttatgaggccaccaattttacggacatgttacacctatgttgttatactaggacccatggaaaagacatatttaccttcctggcaaaaatttcataagctctgcccatttattcccataaatttgatgcgcacgaataagagtcagttcctcttcctgagtccatgcatttttattaatcccagggttaagatggttatgccacctacatcacccacaatattgtttatgtgcgttgaagtaccacccaatgtatgtaaatatcattttatcggaaagaagttgagagcctttgcattacctttccctacattgctttcctatgcgcccaggtaaatgctgagatatagtagaccatttctttggcccatatttttcaaccaggtcaattattgtgttatcctccttcaaaacatggaaaagtaatgtcatggaacacattacaaatgctaaggtgtattagactcaaaccgagtaaagcatataaagcaattcacaaaatcacctcttttgaccacggtcctttcacaagctctgggttcaagaccttttgccatctatgaagacactgaacatcagtccgatccttaaaacattcagctgaaaaggtgaatcaaataaaaccacatattactttcaccgtactaactaaagactacaaataaacatggcagctaaagtagattattattgatatgatcttaacatacgctggaaaaacaaactgggaaaacaagaagaaatcagaatttgctattcgatttacctatcttcttccagttctttccttgaaaacgctcaacagctttacacaagacttcgtcctgatccagaaaaacagaattgatacaacagaaaacttcatagagacgaattcttcaatagatgcaaaggatagctaatgtcaactagttaaatggaactgtgcgaagcaacaatagggtgttacagagacaactgattaagctcaggcagtgttccaggatacataatatgaagcatggaagaatcagatagacaacaaaaaagacacaggaacggaacgcacctcttcaggtgtccattgtcctttggtagatcgtctagcagggccagatgtcctcctatgaaaatgtcacaaagagcttgcatcattattaacctgagaatgtctagttgaatgcaaaatttggtgccaaaagcaatccaacttcaacattgaaacccaatagaagaaaaggaagagagatgtaagcgtacccttgttttcctttgaggtcaccttggagactctctagtggagtagtaggtgctttcatctcacgcttcatagttagcaaggaaagcaatatgaaaaaccccaaagtccgtttctttgatatgtcttagaaatcatcataagcgaagcacattgctgtaatttgaaacaaagataaaccataaaattaaaaacacagtcggactcagactaagaatcagcattagcttcacagcaaaagagcaaactaaagtcaaaacaaggaagaagttcacagaatgaagaaggtagctttagatattgagattggatccaaaaaaacctaagataagaagcccgaattagtttcagaacccaaaacaaaaacctcgagaaaaaagcttcgaacatcatctgaagaaaatcgaaactttatacgaaaaaaagtaagagaagttcaaagagtagatttttgaaaaatcaggaagaagtctccgtgaaaactaacaaaaatgtgaccataataagagaaggagacgaggtcatacgagtaaagctcacaccttgcagatcaacgaattccaaaattaatctgaagtaattaagacgctgagaatccagatgaagaagaagaagaacacaaatcgaaatcgaagtcgagagagagagagagagagagagagagagagagagagagagagagagaatgagagagagagagagaggtattcaaaactcaaacatggagaggcggacggaattcgaagtgagagagagagagagagagagagatcaaaacaaaaaggaaagtgatctcagccgttgatttcaatctctgaatctcgctttttagtctctcatatcataaaagttcaatttatttatttatacgtttcttcattcatttttctttcgagattctctgttgcttcttcttctaaacaacggcaaagcattctttgtatgaaagaagagtttttttctcattaaaaaggaagaagatgaaattgccagtaacagctaattctaaaatcagcataaaaacctaataacaatgtagacaaagtcaaacgagaagaccaagaagaataccaaaactatttgattttcaaaattaattttaactacttcaagtaaaatagtgtcatcatcagtgagtcaattgatacagttgtagaatttacaggaatatacttttagcagttaatattaatagtttgtcttttagaatgcttcctaaacatcgatttaaaataattaaggaaagagatgtgtgcataagaaggcacataaagctaaacaaaacaataccaaatatgactaaaccaaaatttgccaaataagcagctatttctagttataacatcacgagtcaccagtcgatacattaaatttaaagttgcaactagaaatatattgaaaaacagaagcagtcacgagcgaaatctctcatgcttccaccttctgagatttgttccagcgaccacccggtgaatctgatcccctctttctcccgaatctccctcctcttcttcctcccctgcatagaccaagtatattattatctgaagaaccaaacaaaaacttcatttgaaacaaaatcataacaaagaaaccagaacaaaaacatgaactcaccttcctccacggccacccttgtcaaaccgatctttgcttcgtaggagagtccaatactccttttcagcttcgcctgacagagagcaatataaacaagtgaccatttaactaaagcagaacacaaggtttagttataagataagattgaagttgaaaaggtgtttttaccaataacaggttctaggacagcaataaaattcttcacggctagtccaccttcattggctaatactgctgctgcacgggctttctgggatgcttcaggttcatcaaacctaagataacccgtctcagatcccatcttgaaatcaacaaacttcacaacaaaaagaataaaggaatcagtgaaaatgatgtcagttatatgagatattgaatctgattcatgttgacagacagctaagtaaaactcaagtagtaccttgacatcaccaaattttccgaaaacagccttaagatcttcacgtaagacaacatccttattatctttatgggtggctagagcacccttttcttctttctcatcatcttcatcctctgctccctcggcctgaacctcaccagtgttttctttatcagcatcaggagtatctgctggctttgtttcactttcttccattgtcttatcagttggctcctcagaacttttttgttccgtggtaccctcttcagctgaacgcttgagggtgaatgaaatgatcaaacccttgggataactacaatacgataaaatagccataatcagatcaagaggattattagcatgaaaagacaagtaattagatagcaacagtcaaacccctactctggctcataagcagaattgtttttgtgatcagaaccattcttctgatttgcagatcccttctgaggttggtaattagcaaattttacttcatccttctccctttcattatcaaactctttcctgaaaagaatatatcaccttttaagtaacccatccaaacattcaatggaaagacttgtaaaatgagaaacagtcagcaaacaggacatgttttcatgtctaagtatgattactttggtttcagctccaactcctgaccagcaaagaccaaattctgcttcataacattctgggcatcctcttctgtagggaactcaaccaaggcaacaccagaaaatatcctcgactctgcaacatgacgaggcatcctcacactattaacctgcaaggacgacacatacatataccaaaaacttgtataaccaatctaaattttgaacaatggcttatgattcaatcgatagtggattacctttccatactgactgaaaaaggattccacgtcttcccttttaacatcataggagaaaggtgacgcagctactgttctagcattaagttgctcaatcaaatcttccagcttcaacaattcagtactcctaccaacctttttccctgtttaagaaaatccaacaaaattgatcactaaactgtacaaaacatatttctccaatctgacaccacatattatcaaacttgtaaaatccacatgcaaagacttttcttaatgaaactaagtttaaactatgcactacacaggccattcacctataattgaaactctcaaactattatctttcttctaagatatcactacttcgtttgaatcaattaaagcaattgttaactatatccaaacccaacagaaacttgattatatcatgaaactcaccatcgtcagaaatcttgagagcagaagaggttcgaagagtatcagcaacagctttgatggtatcttcaggaatatcatctcctttagaatcacccaacttcaaatatcctctcatcttactaaaggagcaaatcaacgccaaactcaccactatttgacaaaccaaaaaatcatcaattagccataacaaaaaaaaatcaaaatacacagcgatagcgactgaatttgtttaaaagtttaaaactttacagccatcttcgctctctgtaacagtcttcttgaggaaatcatcaatgggtagattactatcactgaaatagaactccacctataaaatcgatatcaaatatcagaacataatcgaaagaaaaaaaactggtgaagctactagagaggaaccgcagaagaagaagaagaagacaagtttgtacctggcgaagaacagttttggctgtctcttcggttagacaaggaatcgacataattgctcaatggctcgagcgaaagatagaggaggaggaagatagaagaataagagagaaaaagggtactagggtttattgagacacagtttccattttctcttaaagttttcgagtcaaattgtcatttatttatttattttttggtttttcgctattgattatatttgtatttcgtattaacccttgacttttttaatactatcaatttaaccccacccactatactttagaatgtaacaaaattaccccaaataatcctacactatctgattcaccccattacgtcttttcgttggcaattgatcaatattttcacgatttttttcaatgatcaagatcaagacttgaaccaaaaattcatacttcaatcagcacaacatttgtatttttgagtcgtgaaaacactacaaactctatcaacaattcttatttagttgtaaagagatatattgattatagagttacagcttacgtttgttttggagtacaatgagattgacattcgcaataatgtttgtacttgtgtaacataacaacgttattacatgtgcagctaagaaacttttttttagattgatcagtcatgtatctcatgcacaacttttctccgtcttggctacatttaccgtccaagtctcctatcgttgtacacagtttctcagcttccacttctattgttttctcaaccacacaaaccaaaaaaaaaaaaaaaaacgttaattttagttcgattaataaacaaatgacaatccaaataagttcactattaaaccatatgttaacgttgtaacaatgctttttatttcctttaatcacaacaccgtttttgcaattagaaagaacatccttgttttatatcttattatatacgagttacgtccatacaaaaaaaactcaacatattacctttaccacctctcagaacgagtaacatgagagtataagaaactataaaccaaataacagatctcatgattgaaaagctgataagaattattaattatctctatagttgcagaaaactattgtttgcctctcgaattttttatctttcttatcaacaacactcataataaatatattcgagatatcgtaaaaatagatgcatctttttttagaatttgctttgtaaaattcaacgagccttcttaattaacgagttcgacggatcaactctttcttttttggaaaaattcttctttgtaaatctacttactagtattatatatttttcactttttttttttgcgtgtattgtgatgacgcatcacctattcttttcaaaatacacagttctaaccttgataatctaaactcacaaaatccataagaccattaatttacaatgtttaatccattgaaaattaatctatagacaaacgttcaatctttataaaacaaatttatggttttctgggatcaatcctactagcaaggaatagatgaagcagagatgctatgggaaaacattcaggttgtgtactgtgtaggatcaatcaactcgaccgtcgtcgatcatttgacgataggccaaggatccaaaggttcacactactgttcccgaggcttcacttggctgatgattttttttttatatggttatgttgtatgtggggggaatcatcgagagacctcatccaggatgttatccttaagagacagaaaagcttagggagtgaactttttttggtattgaaacatatttttttgttctgtatactaattttatttgtccacataagttttcaaacaaattaataaacagtttgtattaaaattacatcaatattacaaatgctaataattaatttttaaaaataaaagattgaagtctgcagataacatgatagtattagtattgtagtaccatggccaattacaaaatgcgtaattacactataacaggatcaatacaatttggaaaactgaacgtggaaaatagattgattggaaaactcatactaactacttagaaagaagtaactcataactttattaaaaatttgtgtggaaaaagagagatacattagaataacataacttatttatgggtcatgaaaatgacaacactacaaacactcataacaattctattagtaaaaactaaaaaataggtaaaagcaatgttggttaggggagtttatcctgagcagcgatgtttacagtcgcaaaaacgtttggtcttgtgtaacatgtaaaggttagtacatgtgcagctaacatgtctttctttcttatatttattcgtcatgaatttcaagcaccccttctctccttcaaagtcacaatttccatcgatgtcttctattctattacacagttctttggcttccacttctacaacaagaactgttagtttgtttttggttgaagctctttagataaaacaattattgataatgcaaaaaaaaaaaaacaaaacaaaaaacattgttctagaacaacatttttgttagttttttctaatgtcaacactgtaattttgtttgccaataatttgtaagggtcatagttctatattacgcaagtaacgaaacagaatcgaaagaaaatatctggtatatattacctttacagacgctaagaacgagaaagacaagaacgtaagaaactaaaaagcaagtagcaaatttcatgattaattaaaatagttgataataatcttttgttcgtgttacttgaagaaatttattgtgttttaatctttattctcattacaagtattcattttcatcatcaacactcgttataaatattcttaactcagagcaaaaatagattgagctatatatagaaaatcatgctttgtgaaattcaacgatcgagttcaaagagccaagtaaacaagttcgacaaaattagtttatatttttagaaaagttgttatttgacgtctacttctgcggcaagattttttgactcttgattttgattccatcgtttgatctgaagtttcctggaaaaaatcatcaccaaactgggagaagctaattggactctcggcggagatccaacgtataaagtgatttcctttgatttgacctctttcactgttcgtattttcgattcattgtttttctcttactccgatttcgtgtttgctgttaagtctacattatattccaagaaaattgattctgataggagtagttcttgttcttgctttgaagtagactatagcagtgccgtgcatttttaggccacattattaaaaatatttggttggtttaacaagttttagttgcctcaaacatgtattttccttaaagtttgatctatgttagaataattcatttcaatatatagatttagaaccttgattttgtattgtagctcactttttctcttctagttatattttaggttctttaaaaataattattcaactaaattagataggccacattttattttttttgtcccaagccccaaaatgccttggcacatcattagaacatgaaagaactctgtatcaaaaacattaatgaatcacaacaatttgctcttaatgatcttcatgaatgttacgaagtgccgcagatccatcattaaactttttctgattttgacttttgtttgttctactccaaatttactcttcactgtttatgacacagacaacacaagaggtgatggaagctcagtaaatgtgcaagcttagacttattacggacccctaaatataatgtgaaaactgctatttactatctaataataaaactattatgaaaacatatacattatcttgtcctagtaatgtcataaaactatattatgaaaacataagagtataaattgccatagtaatgtcataaagctaaaaactggaaatcagagaaatagaagttagatcagaagcaaacaaagtatttgcaacataattaaacttgtgccccaatattacaaccaatttatacatttaacaaaacacaagcagtgttcttcggaccccttaactacaaatgaatgaagtagtctaatttcttacaacattttatgttaacccaagatgactgtatccgaaaacccaataattgtggtgaaacttgccctattgaacctgtgaactaagtattcacctgttgatgttcactgctcgactgagaagggttaactccatattctgaagtgtaaccatcgcttgaacctgtgtcgaatctcctcttatttgttccataccgtggtgtgatgtcattcgggttttcagaagagctataggtcacgctattcccagtctcttcgacctttctcagggccacctcgccttcaagagcacgtactacctattcaagtttttttcaagatataaatgtattcatggattaggcttgttcctttcggatatatggacgaatacatgtatttaaactaaatctcagacctggctcattctaggccgaagccaagctgattggcgtatgcaagcagcagcacaagcagccatgtttgccatctgagttgtatcgtaattcttctccaaccttgagtctacaagaaagtcaaaactttctccagagattgctttcgtaagcaatggcctcgcctgaggaataatcaaaatttacagtctaatgaagtttcaagcttgcagttatactggagtttcattttcatctaataactagtgggaaaaagaaaacctaatggtatcatcatcatcatcatgtactttgacttacccagtctactaaactctggtttgtggaagaatctttggcgaaaattgatggacgtccagtgatgagttctagaagcacgaccccaaaggaatatacatctgatttatcagttactttaccactggacgcgtattctggagccatgtatctgtttaaatgcataccaaatagacggtgcacaaggcatttagtaatcaataaatcttttgatctggatttacgatacaacaaggaagaaacttgaaacttgaaacttgaaacttgaaaccgtaaattaatatttttaaacacaatgacacaacatataaagcatggatggatggtgttttacccgaaagttcctaccactcgagtagagatatgagtgaatgatgaattggtgtctgagaaaaacttggctagtccaaagtcagagacctgaagagaacaagaactctaagctacatgtaatcttgttaaatagaacaaaatggtgtgactataaaccgaaaatgggcaaactctgttctaaaaaccaaactttgataagattaaagagcagatcacctttgcctcaaatttggaatctagaaggatattagctgctttgatatcacggtgaattatagttggactgcctgcattacaagcaccagaaatcaatatcagtgtcgaaaacccaaaaaaggccattgtcattcccattatgaagagaaacaactcacaatcctcatgaagataagctaatccttttgctgctcctacagcaatcctgagcctcatttcccattccaacacgcttcctctgttctctacaacacatattctcacaatactcaacataatgaactaaagacaaaatcaaaaaggatgaaatcatatatctattttaccatgcaagtggaactccaaggtatctttaggaacaaactcgtaaaccaagagtcttttatctccattaacgcaataaccaaccaatgaaacgaggtgcttatgatgaaccctactgattgtgtcaacctcagcttggaattctctttccccttgatagctcccaatcttcagctgcttcaccgcaacttctgtcccgtttttcaacactcctttgtgaacatatccgaaaccgccttctcccaaaaggttctcctctgaaaatccaccagttgcttttgaaagttcttcgtaggagaacattccagatggcattgaaatgtttttcgcaacagaattgttctccttcgtatcacaacctccactagatatatatttagcatggattggtggtggcattgtgataacatgtgcctggttcgtaccagcattaccgccccgatgatgttgaactgatccaagcaaaaaagatcataacttacaattacattacattttaagtgacagtctgaaacaaattgatctcaaagtttataccttttgagggagttttggattgatgatgagcagagctgctgttgttatttctatttctggtagctctgtagaagacaaagagaagacctaacagaattagtagaagagctccaacgattacaccgccaaataagaatccggcggatgatcggtgatacgacgtcgttacaggtagactcttcggaaccagtggctgtggcgttcccggagatattgattcggctggactcgtcttgggctctataacaggcccaataggaggtgctacggtcccatccggtaattggcccgctggcccaaagaaaggaagagttactgctgcaggggacttcttaggcgggggagtggatgaggagggaaatggcgtcgttgagagcggtggtttaggtggaggagaagtttctgggagtgacggagtgttcggagaaggatttggtggagaagaattgatgggaggaggaaacgaaggcttagggccactacggcggcgaggaggagatggcggtggaggagaagctgtgttcaccggcggggttgattcggagggaagtgaacgaggtggtggagaaatcgtatttcccggcggaactgtctcggagggaggtgaagaaggcggcggagaaggtttggcgggaaggaagggtaatggcggtgaaccggaaggagctgagacgtgaggagacggtggagatggagattccaacggaggaggaggaggtgattccagtagaggaggcggtggtgattctataggaggagacggtggggattcaaccggaagaggcggtggggaagcggtgggagcggagagaggcggtggtgaaggcaacggcggaggagagctcaatggtgggggaagaggagacaaaggaggagctggaggtgatgacgtgtcaggtacggaatctgccggaggtaatgacatggcaggcggggaagttgccggagccggcgaggaagaaggagagagcgacatcaaaacgatgccgttttgtgatgtatgcaaaggattgtgaaaacttattcagtcagtattcactaactcatagaggaggaggaagcaggtgaggtttttgtcgtatagagcagtgtaagcttctgacgctgagaatgtgttatcgctttctcactgtactttttttcctttttccggggattattggattaacaatcatttcttttttttttgtcttaaattcttttgttgtttttcaattttagtgctaagacaacactattagacagcagagcaaatcactcttggtttggtttgcatcattgccgcttgtgagcaaccaccatttcatgtctttactaatacaataatacatttttacttatctgaattggacaagttttggaagatggattccaagtttcaattggtccccctagagaattttcagctacgaaaaagtatattttttcagggttgataggttcacgggataagtctagtgctcgttgcataagtggtttttactttatagatatcgacatatcctttatatgaatttcaaagtattttaaaatgtatgtattatctgagggagtacaggattaactaatgtatatatacttactcttttggaaccatgagtacatatagaaaaaaagttgacattaaacttttacaatcaaatcctcaagttactttttgcctaatctttctatgattttggtcatgttaataatagtcactgtctaaagtagctattgaagttacctatttttggttagaccttttacctttacattgactctctttcgggctgataagttgagagcctcctctgagagaacacagcaggagcaaatccctttggaatgatccattcagatccatctccatatctaaggaatgtcaatgtaaccggtgaaatcatttctcttcatcacttcatgaagacaaagcagcatggtatcaactatcaagtccagccattggatgttggaacatttttgtgagcgagttgctcaagaccatccaaggctcttctattgagatttcaagacttattgcaattttgctcatgtcttaatcagtctgaaacggctctaaagaaccccatgttttcccaactttcagtttcacatgaagagggactgtaaaatataggatagaatcagtgatgttcaatatatatacacatatatatacatcacttaataaaagcctagtatatgaggaacataccaagaagtgacaccgcattttccatgctggtttgtagcaacattgcagctagttttacgtaagaaggatcaacttccagcacaagttcatcatgtacctgtatcataatgtcccaattataagctatagacaatatgaaaaatttacttgcagaaggaagtacaatgttatgtatatggaaagaaaccaaagtgaaacaaaaaaaaaagtggaaaactcacttgtagaagaattcggcatcgtcccttcaacatgtgaaatctagtttcacttgaagaactagatgctgcggtatcaacatcttcagcaattgcagaatatatgtttatcatcgcaatcttgataatatcagcagcagatccctgaataaaaccacaaaccctttaaaattttatggtctggaagtaaatgttagggacttcttcaacaatattctacctcaagggaacgagacctcttaaaaccattaccaccaaccaaagaacgaaaaagggaagagtacactttttcaatttaaatagatcgatttggtatatgggcagtatattaaacatgaaagcataacattaagcgtcccggagaaagaaaggaagaaacaagatcagacctggcacatggaatttacagcttgcctttgagccttcgatttctctttggcattcccaaattttattttcgacaagaaccgccttcttcccttgagagtctgaatgtatctgcatatcaaaatgttctacaattaagattatagtgcataaagaagcaaccaaattaattataaagctgcatattctgtctccagcaagaaataatgaaaatatagcttcagaattgatcacataaatatgtggtttaaaggaacacataggactgcattcaaaacaaatagaaggggaaatagacggtaacatccccaccctttttcctggcagaatgaaatcgtttcgtttagccaagaggtgactgcagggaaagaacttttaaagcttcgaattttctccttagcttcatctgaggtgcactcaagctgttctgcgagtctgtttgcacccattccataaagaattccgtagatcaatcttttggtctgatctctatcatgtggactaacagaatcctcggcttttccagtccattttgcagctatcatcgtaaagacatcgccttctggctgactaagctttgaaatcaacgaggaatctctagaaaagtgtgccataagtcgcaactctatctgtgaataatctgccgtcaagagtaaccaattttcctgtggtggaaacaatgaacattatattcaaccttcaagaaaaccagaaatctcttatggctaaggtgattgaataatacatggcaccaaagatggtgtgacatactaaacactcttgccagtaaaagcctatctagtatggttctaccctactgtggagttgtgcaatattgagttgtcctcttcattaatccagactgaatgagtttaacaataagaatagtattgacttagcaactatgcccttccaataccttttcaaatgcatatgtgatattccctaatcgagtaactagcccaataactcaggaggagacccaagctactgacctctctaaaattatgctttggaggaaataaattctttcagttgtgcaatttgtttttaagaaatatgttttcttgttggtttgcagaccaaagacacaacacttacagaaatttacctgagtaggaacaaagaaatcacgtgcatttattttgtaacgatcagcatctgaacttacgtcccttccatttttatccaatttgaactctacttcatgctcaacagactgcagaaaagtaacatggttattgattttaagatacacgatagaatgaaagagcaaacatagcagaagtcatacttggagattaggctcttctatggaaagccgcccagttgctgttgatgtttgaagccagcggccatgcaaagtgtacctttgcgtgctcaagcgtagtttagcaagcgaacaaattgatccaagtgtacaatttaagagctttgccaaagtgcggtgttctttgataattgggacaacaggatgctcattcctgggacaaagttgtattccaatgtatggtcaagactaaaatagaatcacagtagcagggggaaaatcgtgctcttgatattataaccacaaaaattttcgttatataatttactgctgagagtagctcaaataatctgttatcctttatgatgaaaaaacagaacgcaatgtaaggaaaagcaattagccattcggaataccttaaaagatccaagcaatgcttatcagtacttggatgaagtttccctttagattggttttcaggtatgggcaacttcaactgtccaaacaacacatttgcaatatcagctgggttgtgcaatgaaaatgtcatgccagccaattcaaatgctttcttctcaagggaccgcagtttatcccgcaatatattccgtgccctaaggcatccttctatatcgatacctataccccaaagctccatgtctgcaaggacattaacctgaaacacagaaggaaagcattatgctgccgcaaaacaacaaacttagcagagttagaaatttctttaattgactgcctccctggccattatctacctctatcacataggatattcgtcaggaagctgtatggtagcaaaaacttaccatcacaaattcacaatacaaaatttctaaaaggaaaaccaaccacagatggctgcttgagcaaataaatataaatatttaactttgagcatatcatccagcgggatgctggtgaagtttagaaaatcctcagtaactaaagcaagttaaaagaagatttaccagcggcatttcaatggttgtcagtgcttgaagaagttcttcggaaacaaggatcttccaaagtgctgaacaaagggctctcgtttgagcaacccttctgcagcaaccattgtgggcaacccttcggatctgattcctccacctgccactgcgattagcagcttcagctgcctctggggatagccttttctttacttcctttaacatcacatttacagttttagcaacttggcatcaacaactatactaaggaagtacctataagctaaatctgtgtgatgatagagactaaccaacaaatgataaaaatatatttatacattgttgcttttcttgttcaacaccgtcatcaggagacatatgaaatatattgtatgatttcgctaatagtcaatctggaattaccttatcgatgtttggatttgagtgtctttcctcatctggccaaagaatccatatcacaatgctcatgtcaatggtgtggcttgtgtgaagaggaggcatcattaaccaagatccatcgaccaactcatccctgatcccttctggaagattcaagcgagtgcatctttggattgaaatggcgggactcttaagcacctgaatctggactttcaaattccacgtgaactttctcgtatttacattccccataattttactgattttgttccacctagactttataacatccaacatgttgtgagaagccagaacctcactcttgccaataactgcatcctcgataagcttttgtttttctacacattccaggttgggaagatccttattaagattgacatagtatacaggggagcaattccagcagatagcaattccatgtatctcataagagatgcgtgaattcaaatcttgtagtttattatagtgaagatcgaagaaaaattcgccagcagatccccaaagttccaagaaagaatcaaatccgccactaatatttcctgcagttactggacccttttcacctgtaccatccttattactactcagaggaatatggtcattcctagtcaaatgctgctcaacattgtccttaggttttatctctctgttatcgtaaacagggatagggaaagtatcactggaaagaatactaacagcactaggcccattagtgccgactgcagttcctataggtctaaaattaggaagacgactggtcaagttaatttctgatgaaacccctaaggtagcatcacctaatacttcacttggcttttctctgtgattatccatatcaaagttttcacattccatgtgcccctctatgctttgttgtaatccatcgggaccaacagagcctctggaaatgtctctttcagtagtttcttgtccattgagactactagcaggagccaacggcaagggctttgaaagctcattaacatccaaaccaagtgacttaaaagcagaaaatgcagcagccctcgcctcttctgctttctcaagaacaattttgcgagccccattcttgattttcttggctaatcccaagtgtatccttctttgtccagtacctgatacaccatattaactctgagcacattagatgaaagatgatacaatattctttctgacaaacatttaacttatcgatgtttatataagcttgagagatctcaataaggcaacaaatacatcaatttaaactgtctaagaaaactaatttaccttctgcagcccacgctgaagattcaaaaagagctttgacaatttcagggatggacgcttcagctatcgcctgagatgtacgcaagccagctttatacagcgctctagctcttgaaccctatttattcaacaccaaaaaccatctttattaacatcactcttcatatcctcgctataagttcctggaagctgcaagtacctttatatatggaatgctagtaagttcaacaatctcagccctgacaccaaatgaaacacggttctggaacttggcaactaatccttccaaatcatgccatccaagcctctcacagaataccgaaaccatggaagaaaaccttccagcgttctcctgtagcgcttgaaccatacctctagccactttaaaggcttcacagacctcagtcacagaagcttcctgcattacacagttcaagaacaaaaagaaacaagtcagctattagagaagtcgatcatcaccatgccttctgatgcaaaagcaagcattgtcagcaatttttgaaataggaattttgatacaaaccaaaatctttaagggccaaaacaagtcggacatgtaagttaagtaatcagtttaacaaaatatcatgaagtgtaggtgatcatgcaagctgctaggggtttacatatatatgaaccaaactaagaagctttagcaaagataatatacaagaaacaaaaaaaaagcagtgtagtggggcaacctgaactaattttgacaagatgagagcaacaaaaaatcttttgcacactcgaagcatttgttcatctgaaagcatcttcatgcttgtcgaaccatgccgactgtcatattctccacgcaaatttttttttacatcctgtggtctgtttagagtgcgaactgttgcaccatgtgccatgcgcatcaggaaaggttcgaccactccaactctattgccaacagactgaaatcgaaagattaaaagtaacagcatcagcgtataaagattttctgagaaaaaactacatccccaaatatcaagacctaacttctatagttttattcaaaaggcactgcaaaacacttgaaggttgcaattcagcttcccacaacggaagtaaaggagaaagagaatgcataactattttgtagaacactaaaagtttaatacgaagaaaaacatttatttaaaccataataacagtcaatttagaggaagaactaacaacatacttcttgtttatcaacacatagttatgccatatattatcagagagtacaaaattacctgctctaaaggagacagttccatgaaccgttcataatacaattcccagtttggctcaacaccaacattaattggtgtgactaagtagaccagatgcaaatcagaagccataactagtccttcacgtgctcgtagaagatcatccagcactatctgcagcaacaacaaacattgacgtcaagcatgcttacataacaatatgtaaaatgcaatttcaaatatagaaagtcagattagattacaagtgactcctctgggcagagtgaactgccaaaagatccacgtccaaggggtgttgtagtgtataactttgtctcttcattccactcaagaaatttcctgtggcacagccaccgaagagaatcctgagctgatttgaccacatcttgaaagggctttgtagaattcagaagtgtacacctaacatagcgatgaatatctttggcagtctgaacaattccacctgccacaacttctagtattgcatgagtcattccatttttatcctcagataaacaagactgcaatggtgggcaggtttcattaagaagtgccattattcgcttgagttctccaggtttgcaaatcaaaacctggaaagaaaataaaacatagaacaagaatcaaaagcgtagaacattgaccactccaaacaagaaaaaaatgtatgtgaacaatctgtctaaagtaatggcacgatgcatccttagcaagacagaaattctgatataaagtttccagcgtcacagaattagacatacactatctccttttgtatcaatcccagttcgcccagctcgaccagacatttgcttgtaccttgttccatcaataaaatcacggccaatcattggttgtcgaaaaataaccctccttgcaggcaggttaaccccagccgccaaagtggatgtagctgttaagacacgtacaagacccttacggtaacaggtctcaactatctctctttcttctacctgtaatacaaagagttagttgcccagtgtgccaatgaatggaatattcactttgcgtaaaattcaccgtcgcccatgtaaataggaaagaatcacagtcccagtattataatttagccagttcaagaaaagatctatgatgaatgtgtaaacatactgtaagaccagcatggtgataggcaaccccagagggaagagtttcttctagtacaggatctactccagacggagaccttcgcagggcatcaatagcagatctgatatccataaactcactattttcaccatcaacgtttacgggaacatttttaatgagctttgaaatatgcctagcagttgattcacatccttttcgactcgagcaaaatatcagcactgaattgccctcttgaacaacctggatcgtgatattacatgtgagtattcctttttgaacaaaatatgagtacatgttttatcaaaaacttccattacctcgttacaaagctcaactatatggtccgggtctttccctcccatatcagcagcttttggtatagtcctcacaacttccatctttttattgtaaatggtgctacctactttaatatactcctccaggggaactggtcgaaactctgtctgatataaagctgcctttcaacatgtaaaaaaaaaaaaaaaatctggttaaatggccacaataactttacaaagagtttcaatagaggtgaaaaaatagcttccgaaagtaacagatacataaaacctatcatcatccatttaagagatctggagatacagaggtcttcattttacaggaaacataaattttattaacaatctcaaacagtatctctgcgcaatttcatatataccatattttataaattcccacagacatgcagaaaagtgtcatgcaactgagtgagggcaaaatatatacatacacacacaaattgtgatttgttttgcttacttgaagccagtcagcaactgcgccaacatttggcattgtagcactcatacccacaatttgtaggccatgagcaggatcagctttgccactgctagtccctgaactctcaccactacttgattctgaactgccttcaccagcagcataacgaagtttcgtcaacataagttccagaagataacccctatgttggtcacccacctatataaacaatgatcaaaagattccttttaatgcatttgttatcaactatatgaagatagagcaaaatacaagcaaagataaaaaataaagatgttttcagacagttataacttataagcttatccgagatccatgcagatgatatatgtgaaaaggcataccatatgtagctcatctataactattattccaagttctgacaaacgaccctcttcaagcaagcgatttatcaaagagtttgccttctcaatcgtgcagacagccacagaagtgtctttaggaagtgttccaccaccctgatttccatagtaactacgaacatgcttaccaagtggttcaagaaggacctcaaggtgttccgcctgcacccaatttgaaatacgattaaacttacagaaagtaatattgcaaaacgtgtaggatgcttggagaaacaacagaaaccttctcggcacaaatggatacataaggtagtacaagcaatgccatttttccagttcttatgacccggcgcagcatcaagacttctgcaacaaaacttttaccagcactgcgcaaacagcatggttttgaaattgataataaattcttgtaagatagaagcctcctagtgagattaataatactgctatcatgatccaaagaaaatgtatgaaaaagaaactttgaatcagattcatagccaacgatgaagataccttgtagaagcacaatatactagattccttttctgcaaaacaccatctacctgaagacactcgacctagaaaattaacaatttgtattcagctcatgaaaaggacttcagaggcaatagcatgcgtacaaacaggcatacaagaaagaataggaaaactttttcagatatgatactgacctaaaatcactcattaatcaacggcacatatttagaaagtataaatacaagatataagaatagagtcgaggataaaaattgtcaataaattttgtgcaagttcatgaaaaacattaaaaaataagaaaaccaacatacatcacatgtacaaccacggcacaagtgatatgataaatgtcatgaaaggaacaatgcatgaagagccgattaactttggatggcgaatactagcagcaggctctcaactgatattatttatttttgaactgcaatagagaaacagatttacatctatctatctatctatctatctatttatctatctatctatctatctatctatctatctataggagtaggcacttcaaaaatattatcagctgtatccaaaaataattaacaaataacaacccacacatcaactaatagttatgtacctgccaaggatagagtttagatattcctttcttattgtatacactgcaaacttctgagggaagccaagtgctgagactcaagccatcgtaattacgatgagagcttgaaggagtatgactttcttcggattcactagaaccaactggtttcctcatgttgcttatcatagaaacagatcttacaccacgattttcctcacacagtaaaactttctttccttcgggttctggatacatcttgcctatcaaacctttatctgcctgagcattatttgcaatatcaagattttcacatcctttattaccgacgaaagcagattcagagatcctactgcttcctagagtaatgttattttgatcaaatgaagcacatcgctcttgaatacctccattaatgttcttatcttgaaacaaaagttcaagattcttgacaggaagctgatatacttctttattaaaatctctcccatgcttctccactacctttgaaaaaccaatggcatctttatcctttactctgatttcatctaaatctaaactcctctctaacttttcagtgcatttatctgttttcttgctgcatgaaagaatagttacatgttgatctctaactttagcttctacagaaccaaaattttcaattggaattgtcaaaccatcagcaacttgaattgcttcattccagaaagcctcaccaggtgagaacattgagctaccacatcctgacttaggggttccaacaggacatgatttaatggctgatccaggcgtgtggaattcagttagatgagcagatgattctggcgccttactacacttcctcaagcccattggaatttcaacagattcattgctcggcatctatgaatatatcagagcaaacacataaaattatttgagataaattagtttagtaggaggacaggtaatcacgattgttgattccaattataccttctttgtagggtctgaaacaggtttatctctattattaccattcctagcgagtgattcaggcttactcccgagaggatttgtaagatcatctagtgatggtatattttcggactcacaacgcctcttgtgagaaatttgtatatcttgggcaagtgatgatgaactgcttcgacgcttcaattcattttccttctgatgtggaggtgagccaacaacagactgcactccactgcaaaaaacagacaagcacaatttacaaaatctaaatttcagaacaaaagtcagacataataaaagaatgtaagcatgtaactaactcctcgatgataatggaaagaataaaaatgtggcacaatgaaagcacattacctacaatacaaggacaagaaactagtggcaaagtctcgtagttctgaattatctttctggttagcacagagtaaaccatctgtagcatgagtttcagctgcaacaccttctttatgcaaatcttgagatccgttctggcccaaacactccttaaaagttgcaaaacttacaggtttaggcaggcaagggtgtatattttgaccaacagacgaagcagaaacctccaaatccaattttcttgtaaacgcttcctgccttgcctgcaacccactattggtagtactcttgtcatccagagaggctttcaagtaactgtccaaagtgcctttgtctccaggagatctttcccctgtcaccttcacatttttctcattcctcccagactttaaatttggtgactggtgtttcctcttcttcgatacataaaactgatagtacagtgacaagcaacataagaaaaatgattcagtacaaacacacttaagcttcaatgtcacaaaactccgacttttgacccacttctcattcatcctaactaatttcaaaatttgactgaagaaaaagctttaaaaacattactttttaatctaattcatggaaaatccttaacaaagtgtaagactttgttcatgaaaagacttcactgacttagtagaaaattcaaatgataggattccaccaaaatgtgattcaattcaagttactgggagtgcccaaaacaatccaatgaatcgaagactcaacaaagtacaaggttcatccatttgaatcgatataggtcagatttcaaaaagcacaagtttttgaagtgttgagaaacttgaagttgttgcagcaagcacgaattttcacacagagaaagaggagaaagagatgaagaagaacacaaacattcgtccgaagttcgtggagacaaattaagcaaagagaaaaagaaagagagaaactgacctgatcaatccgcgatttagaagaatctgagtccatgagcggcggaaatagagtaaccgccggagatctgaagaaaaaccctagtcggcgattgcaacgccggggaagtgaggagcgcccaaatgcaggcagatgtagaaagaaacagaaagaatctgtagcgtttgaatttttgatttcccttctatacacagagctctctctatctgtgaccgcgtattattgtattcttttttttttttctttaaaatttcaattttctcgttttgacgctcagattttcaatttgaaccgtaaaggtgcttttgcttttgggttgccgttgggcattttaacgcttttattagaagagtacagtacttgttttctaatcaggtgaagtgttgtaaataatgtttagaattgttcatattcttaaaagttatacttgtaatgttacatattttgtgtcagaccatctaatgaaaaagtgctattgcaaatttgcagtgagagccaagagtagaccagttctatttctcttacatagctttccaggaaagaccaatattccgtagaatcttttgtgtactttgaatggaaacttaaagtagaacaagaatctgtagttaaattattcttctgctggtttattggctgcgtgtttacaagcacattgaggcttatgcttcggtttctcattctgattcttcagctcgtttccagccacaaggaaaaatgcggtgtgtctgaaacagatcaaaagtagccaatcaaatctgtttgctaatatctacagaattctaaggttttaagctgaataaaacacccgatcaaactttcatcgaactatgtgacttttgactctgagaagaagatggtgttacctaaagaacttcatcattttgatttttgagtcctggtcaatgtcaaccgaatcgtccagagcattttgcatgtgctctagccatctctcagcagcttgatgggtcactggaaatggacggtgacgtccgatcaaagcaggatgacctacacattggtaagataaacaaacagccacaagttaagcaaagagattttggagatgccaagtcatatttagtcaaaaccaactcaaaattggtgtgatatcaaatatgtacattaatgtcatttgtaatacaatcatacagatacaagtgtgtgtactaagtgagcatcgaaggggtaaaaacaaatgagttagttgatgtgcaattttttagtcaagcatgaaaaacctagagaaccaatcacagacaacaacttatgaacacatatataactaagggatcgcagcaaacagcatatgaatgttaaaacacataactaagggaaaagaatctaaatttaagataaaaaggcaaaccttttctctgagaatacaaaggagggcctcccatacgctggacaaagaactcatactggttttggatggcatcttctttgttagagttagaaaatattgattgaaaccattcttcttcgtcatcatataccctaatacccatttcaaaaacaagaaattcattaagaacacaatgtccataagtagaagcattacccaaaatcttaaaacttgtctaggtaagaaggacttaagagacttgtcaaatcagaaactagtatatcttataacactttcatatctgcaattccaagccattatcataggaaaagttatctcaattcctcatttgaacaagcagagagactggaattgattcttcatcaatattaaaggttcacactttcaaccaaaatctcctagtctacaccagattttaatcgaaaaatggagcttagcaagtgagagctataatataacccagactccagagcgaacacaatacctggtatagaaattggtggataggttgatgaatgtctgaagaccaagcttgtcgaacagattggactcgtcgatggcgaacgcctcagcctgatcgacgccgcttaacaccgatgccttatcttgcagcgattgcatctccctctctctctctctctctctggttttcgtctctctcgcagtgatgaagaaactgtgggtgattgaattgaattttaaaaaggaatggtgggggctctggtcgtggtcgcgtggaggcaacgctctcttttttctattacactagttgggcctttttggcatatgccgtgaccaaaactaaagacacttgtcttgatgattctctttgacttttggtcctatccaatcaatttaggattttgaagtaattgggcacacttgaattggcccgttaagaagcccattattctaaacgcgacaaactctttagtgacgacgatttgcgtttgaagaaataagtgatttaaaatccgcgtttaaaaaggactaagctgagctgaccccgtcgagaattggtttcctcttttcctcgctccgaagacaagaaatattccggtgaggcaatggcgtcgaacagcagagaagccaggaggcggaagatcctagatagaggatctgatcgtttagcctttatcactggtcagatcaacggcgttccttctccacctccttccgattctacttcttccctttcccagtctgaccttcaaactgaccaatccttaccggatacgattccccctcgcgatcagattcttaaagctcaagaaatcggtactctttcgctctctctttctctagggaatattgtcatccttggattgtttgtgtgtgtaagaatttgagcgacacaatcgaattttacttactctattgggtgaaaggataatcaaattggcttctttgatcagattttatgtgtgtttggctcgtttcagagtggaattcatgtgtgttaagaacccggcttgaaccattggatgtttgaaatagggcaaatttgtagagaagaataggacaacgcattatctacatttttatcttttagtttattttgtcctctgagtatagtagttaatgggcagtgaagctgttaaatccagatttcaacttggaacctacttgtcttaagctgaaattagatattatgaacctgatttcactgttctctacttttgcttaagtcacctcgccccttgaaattttctttgccattctgtgaaattctttataggtgtggttcaaccacagtcaagtgtttggaaagcttattatgttgtgtgtttttgaaatttgcttgccttgtattgtgtcacaaagtttggaaggaaaagattgctacgctgcttgattggagccaataaatcttaaggcgttgtatatattcacaatcagtgggttcttagtggtggtggaaaaacccattgattgtgaatgttctttttggcgtttcttgaagctaacctttgctgattttgatgatccttggttgtgaaattgcagctttcacaagtcaccaggacaacatctctgatgctgcaatgcttgagaatgtggatcatatcatccatcaaagcagggaagaacctcttcagcctcagaggcatgctgaaacattggcagaagcctctgcttcagatcctagagacacaacaacaatacaaccgcctcctacaacatcaagtgttcaaaacccatcagtggtagatttaggtgcttctcaagcatttattcctgtggttagttttgtgaacgccatcacaccaaagcacattggagcggccattgatgcttcggaatacgcacggatgttcacagctcttgcgattgcacttgttgtcatactatctcatctcggtttctcttccctaggcaacattgtaagcttcaggccagttttcttgcttgtcttgactgatgccacaattgtgcttggacgtgttctgctgagtcatcgtggagactcttcctcggcctcagggacggtgatgagcgggcagggtattgtggaccaagtaggcaacgctttggagacggtgatgatggtgaagaagataatggatgcacttcttatggattttagcttatacgctgtgattctcatatgtggcctcttggtcacccaaagcatctttccttaggtcaccttttaaattaggtttctttgtgctcggtagatttgtgttttgcttatggtttgaatatcttaaaattatagttagttccaaaacataattacatgtttcagatatctttctctttccttttcttttgcgtgagaagatcaatatttattggtgtttggtagtttggaagaataaatttaaaggttctcctccaattttttttaaagttatcattgcatcactgaattagggtgtattttttcttgttttgagattttgtgatctctgaaaggaaaagaaaagttaaggtgggaaagtgcagactgaagagaaagacaaaggaagaagtaaataaatttttggctgtcacacaataaattaccgagaaattagggaagcaacgtaagaaagtccctctgtcgctgtcaaaaaaacaaaggtaaaaatacgtcatacgacgaatcataaacgtttgtttctttttttttttctttttttttgattatttataaattacttttttttttctttttggcagccatttttttcatttgccgctaaagtgaaagtgcagactgaagagaaagagagagatacaatcgaagttccaaggtttctagttcccggaaatggagatttctccggcggaagacaaactcgttggctccggcgaagctgttactacagaagaagtatcagacataaataacaaagctgtagacatttgtcggatttgccaatcaccggaggaaccagacaatccgttgagacatccgtgcgcgtgtagaggctctctcaagtatatccactcagattgtcttttcctctggctcaatcgccgtaaacgcaaccattgcgaggttttaaacccctttttcaaaaactctgtttctgctacgaattgagtttaaagtttacttctttttcaaaaatttcctcttttctatgtgatttgaggaagatgtctctaaagtttctctctttttcttgttcccactgtagatttgcaaacgtagctactcaattgttccggtttattccgagaacgctccagagagactaccatggcacgaattcttgatgggattgctaatgagagcattacgtttcatgaacctgattcttccttggatcttgatgatgcctttcaacgcatactgcttttcttttcgtccttggggcagggaaagtgagtttgtgaaccagactgtttttgaactgtccttgagatttcctggtctgttttacactgctcagatagtgtctagtgccaccgagatggttgttcaaatggaaacgataagagtgcttttaaggagacaccccgagttcttgcgtcgtatgatcatcttagagaatggtcttaaagatagagatgttactggaattgtgctgctgttagcaaatcatttgcaaattctgtgtgattggtggcatgatcagctcttacagttgccatttctccatatctttcaaaggggacctcttgcactagcgtttgttcctcgaaacacgccccttcatcaatttggagccatcagaagggttttttcccttttgagtgacaacacttttgctgtaagtcccagctctctttattcaattactcttacataaagagaatcatgcactgtagagattgttgtcttagctttccggattaacattaatgtttcaccatgttgtgtaacagattcttttcttttctctacaggttcttgccatcaacatctattggtctttcttcagggttcttttaccattttcgattggccgagttgttttagttctcctacgctgtctcccacacggttggattgcggaaaatgcatctgaaatggctgctggagatatggttatacgctcagttttattggcttgccttggaggagtctttactatgtctcgagacacttatctaacaagcgtcagaacgtttttaccgtcagttaaggatacattcatcttgtcttttaaactcggtgttctgccttggttacttggttgctggctacatttctgcactttccctatactgggaaagacagcttcccacaccgttgaggttctttcagactatccactcatggctgacaaacattggttaatgggaacgttgtacttggtatctgctttaagttgcatggagcttatccaaaaggtaaaatttgaactttttgttcagttctcacgcatcatctagtttactccactttctcttctttcttttggcagatagttcagaaacgagccttatggtatctgctagatgttgcagaaccaaactacaaagtcaccaaactgcatcttggtcccattctcttggcgtttgctttgcatgggacaatggtggtgattgtgcttcacttaccaataaaaacaatcagtctcatcagccagtcctttttccctctccaatttgggtaagctcctctggaccttaccacataatgtttctaatttctcgattcttgaacaaaatgtgcctaataagggatatgcagggtgtacgaggatgagtttgtgtttggcttacttgttgcttatatgtgcctagtaatattcggtccccggtggttagccaatttaattagaccatccatcagacccatagttcacaagtgggttatcactatcagttctttgctcaagttgagtgatttcttgcttggagagccccgaaaacaccgtgcaaatcataatatgagacttcggtgtctagtatttggcatagctgaaggctctatggtcagtttgcatggatctcaaagcgataccacctgtgaaaaggatacaaacgagcaaagagataaaaggtagtagttaacatgcttttaatagagataacttccttcgcaaaatctatattctgataagttgaagtctcaggtttatggtgaggattggagtgatgttgattcttgcttctctgagtatgtttcttgttagtacaaccttcatggctttaccaattctagtgggaagggcgtttttccactctatctctttcttcatgctaagtttcggactcaaacacgacggtttgtactttcttaatcttgcttcacacgtctttctcctttgtattatgcttctaattttaaaaccaatcattttagatctttgtgctttctggattggattctgtatcctgcgaggaatctatatcatcacttgctttgtctatgatcatttcataacgggaagaaccgatttgcttctcaaccatgtcctgatgttcatacggaatgtcttgttattctccatatgggtaagaaatcccaaaactctttcactgaaaacgtctgaatattatgaatttttgaatcatgatgttttgctgtgaacagatctctgtcataccgggagtgctcggtctccttatcgaccttatgatcatcatcccatcacaagttccgctaggtgaatccccagtatataacttgctccacgattggttgatcggtgtagtcgtcctacacatctggatctttctggtaagatgaaacgtctgtccatcattattgcttcaatcaagaactcgttattgtaactgctttcttctctcgcagactatgctcacacggatcaactgttttgcaactgtggcctggcgggaaaagcttcaaagaatcagaagcgttacaatcaaccgacttccctttacgtggctgattcgagatgttattggttcgatcatagtgtcccttttattcactctctgcgttccctacgtggtggtaaactctctgttcccaattcttggattttccagtgcagtcaacttaaccgtccagcggttcatttggccggcgatccttgccttaatccccatatggtttagtgtcaagctcattcgtgatcttatcctctaccttcacaagctggaattcgataatcgatacaaagtgggcgagaggctggtcgatttcactgaagatctcgagtaacaacgaccaaaaccaatggttattaatagagaatgtacctagtcttcaattataagtacatatacagtttcttggtgggtgaaagtgaaacagtcttcttcacttaagattgagaatcatcgagtccttggggcatcttaagtttcattaatatgataatggatggtgcaatgtgtagattttgcttatgatatgcaatttacacgattgattagtttcaaaatatgatgcaagttttatattctcaacaacacaatgtacaacagaggtattttccagaataaacgtagccaaactcgtaactgaaataggaatactactgtttggtgctactgagaacgggagctttagaggaatctaacaaaaaaacttgttaccaagtaaaattctacattttatggttctgattttgcttcttctcaacttgagctcttaaagaaaggatggtcaagagcttcgtttgctgtgagacgctcagatggatcatatgccaataaaccatacaatagatctgcaaatctagatctcgtgttgtcaacatgtttcgataccatatcctgcaagaattgtaagcagtttctacttcagattacggcatattaaacaaaagatatatcattagacactaacaagaattaatggtgattaaaccttgagacgatcaagtctttttacagccctaatactttctctagagttggctccttctggccaattcaaccgacaccctctcctgaaatatttctcagcaccccggctacaaaaacataacgaccatacatgcaacaaccgatgagcatttatatctctgtggactttttacgcacccaaatgtttgtggaaacagaaaagtaacctggcttttcgagtcatatgttcaggtaaaggtccaagcgccctctccatcatagctagatgttctaggttatcatgcgtctgaaagagagcctcaccctgatggacagtttgaaaatgttgacaatagtaagtaaaacaactaataaacatggagataagaattcatacaacaaaatgaagagactttaccgtgcatagttcaaatagtatacaacctatactccataagtcacactggtaactccatcctagacctgcaatgatatgccactgattagttaccagggaaaaattatgttcattcgttaagcatcagctacggaatccacaagcatctattgacgagcaagtaactgattagcctacctaaaatgacctcgggggatctgtaatgtcttgtttggacaatggagtgatgaatccggttatcacaaacagtactgccaaaatcaatcagtttaatggcgcttgactttggtaagcacctgaaatgtgtctcatttgcagcactcctctgttatttaaaatcaaataccaaactgtcaaaaagtacaaactcttgaagatttttctttttctttcaaaactttaactacagagagtgtacccaaacccaaccttaacctatttcagttctagataccttattgtcaggaagctttacattttcagaagacaccaacagaatgttctcaggcttgaggtcggtgtgaactaactgtaactcgtgcatatctgtagacaaggaagattatgttaagaacagagaggcattaggtaggaactacagctgctgaaccgggacataaaggtgacgtgctaggtacgataattgtataaaatagcagcagataggaacaattcacagacatgctacagattccaaaagctggcatccaaaatcccgaacaagggccagaggaaatgcggagtatttatttctctttagaaagtcaaacaaacttggcccaagcttctcgaacacctggtatcaccattagagttcattcacaggaaggttccgtttagttccaaacttcgaaaaaatccacatgagtaaacaaactacacaaacactatacacggaattggatttctgtcacttgggcatcaaacaaagaaaggtagccagaaatattatgattcattcatttgtaacactaacaaacctcacaggtcactgaacatagaaccaattaaatattagagatgcatttgaacggtggtggaaatcaatgagcttagttgggatacttacaatgcaaatatgatttcggtaatcaaaccagttcttcatctgtacacagctgcaaggacaaagcagaaatgaagaaactgagcaatgatatacacctctgaaggaaacgatgtcatcaactaaagtctagaagataaataaataccgtgtgcggcctttatcactcttaacaagtttctgaagtacatcaatttcaatcattgctgcatcccggtatttcttaatgcttcgaattatctttattgccacatattcttttgtatcacgatcccaacattccaaaacccgaccaaatgtgcctacaacaccagcaagttcactgaaatggcacgatttgattcacataaacattttttttatctcgaacacaccatgccacttgacagctaaccttcacccatcttgctaagtattttatctgtcaaaagtcaaaacagaacacacaatagcgtaagttaagcaattaaaaatgttcaggaaggattctcatcccaatgaaacgaaagcgaaaaaagattatccctaaggcaatggtgccaaacaaaacaaagagttactagcaacaatacacatatagaagcaacataggtaaatatcttagctcacatagaatagaaagttagcaactttatccatcaaaaactcacatctaggagtgagattgtccctcaaactgaaaacataatgaccatcacgatcatcgtcccttaatggtggtgacaaaatcctcccatcgcttccatgtcctttaatcacagcccttttagcctatcacaaaaaagtcaaaattcattcattgtcagcatatcaaaatctcaccaaagaaacataaatgctcggtctttcctccacattctaaaccctaattcgaagttctaaatgtcaaagattaattaaaaaaagaagaagaagaaagaggagcaacctctggttcagctggggcctcgtcccaggtcatacgaggacgtttcctgactcgttctttatccatactctcgaatccgttagctatcatcaccgacgcggaaaatcgatcaccgacacatccagaacggaatctgatgccaatctgcagctaaaagagggaaaatttctaccagaaactctttacgtagatgtaatcacaaggcggcgaatcggggagaaggtgataatctccgaaaatggtgaaaacagaggaattgctagggtttggaactagagagagtgcaagagaaagacaactcccaataattttaccggccaaatcccttggggtcgaaccgcgacgacatccaccaattgcattttttttgcactttccaccgaaaaaattgggtctacacgatcacccggaatgtttcgcccacccggcccaaatgaaatgtggtgagatcttcttataatcttggcccaaatttccatcatggatcttaaacgttcgtttcattgtttcttggattttttttcattaactggtccatctcaaaatgggcttccataaaaatgggcttttttacaaaagggttttgtttcattaattgattttcgtgtttttttatccgtaacaattatgctttcgtttcctaatttatacgagcaaacgtaaaaatgtatagtatttgactatttggttttacgtatcaacaatcaacaacatactgtacatcagtacatacacaatttttttttaacatacacaaacttactttatgtacaaatgaactattaagaaatggctttagccttgttattgcatgcatcttcttaatttgtgtatgtgaaattcttcataggagctaattaagggacgaagacaaagtgtatcccccttcatgtattacctaaacgtatcttagaatttcaaaacattgttttccttagaattttttaaaaaaattgtaaacatgcacatccaacactggaaagtggaaagaagtatatatatatgatatgttatctcaaaaaaactgaaatgattgtattaaaaacatactaaattctgactgatgatagatattgatacgtaattcatttgtttattattgttcgttttgttttcaacactactattcctgtcacggtctcatttaataacaacaacaaaaaagacgtcaagatttgacttttgagttcctcaattttttcaactccagtatttaaacagctaattattacataatttatcgtaagaaaaaaaaaaaaaaaaaccttatccccctgatattgtagatctcgattgtaatcactacacctgatgccacattaaatacacacagagacgtaaataagagtcaaaaaagtcgatgaagccttctgcatatataacaacaaagttgaatatataaagagtaaaattcatcatactacaatcttgaaaaattataatttattagatggttaagtaaatttgttttatagtattgttatattctttttttccaaaaaatatagggaaaacaaaaaccagtaaaaaaaaaagtcaacttaatttgctcaccaccttcttgatcatctaaacacctctttaataattcaaaactaaaaaaaaaaggtataaatgaaagagacaaaagagggaagtatatatcatcaagcttgaagaagagagagaagaagaagaaggaaaaaagaatgtctacgacgactactgaggcgagatcaccgttgccgttgttgttgagaagaggaaggtcttcgacggcgttatcggcgtcgacggcggaagcaagatcgccgttatcgatactgcagttcagaagaagatcgagcaaagatgtgaggaacataacgtcagtttcgagcagtctcttgcctgcttttgggactttcatcgaagatgataatccttcttccaaacctttcatcgttcttcactttgatcgtcgttacaggttcatttctcactaactaaacaacgaagaaatgttttttggttatcaaacaataaatagtgatttacagatttcataacttttctgtttctattagtccataaattaatgatcaaatgattcgttcattaattttcatatttttacgtcttaaaattgttatttcttattaatattcatatatcttaatttttttttaatctttccatataaaaattaatggtaggttgtgggaattgtttttggtgatattggttgggtattcggcgtgggcatctttgttcgagttggctttcgagaaagctgccgaaggagcgttattgaccattgatctcgtcgttgacttcttcttcgccgttgatatcatcctcaccttttttgtttcctacttggataatactacttacctcaatgtcaccgaccacaagctcatcgccaaacggtaacaaatcaatttgtttttatatgttaaaaaaataacataagtaaaatgaataagttagaattgaattatatatgttgtgcattattataggtacttgaagagcgtggcttttgtgatggacgtagcatcaacgttacccattcaattcatttataaaactattaccggagatgtcggacgaggccaagctttcggcttccttaatttactccgcctctggcgtctccgtcgtgtagccgaactctttaaaaggttttttctttactactttctatataatatgcaatattgaaatccacttatcatatagtacatatgtgtgtgtctattttacacttcctttctttctttttttaacagactagagaaagacgcacatttcaactatttcgtgatccgagtcatcaaacttctatgtgtaagttttacttatattgaattatctatatgtggtccatacaatcactaaattggctatgtcaatctatgacttttattcaaattgtgaaatttgattcaggtaacgatattttggatacatttggcgggttgcattttatactggatagcctaccattatccaaggcctacggatacatggataggatcgcaagttgaggattttaaggaaagaagtgtatggttagggtacacttactcaatgtactggtccattgtcacactcactaccgtgggttacggtgatttgcatgcagttaatagccgtgagaagacattcaacatgttctacatgcttttcaacattggcctcacttcttatatcatcggtatcatgaccaatctagttgtccatggcgctcttcgtacattcgccatggtatataatcattcattgcttaaacccgaaaagattgtttactcattcatttactctaccagtcgtacaataatcattcttctgctgaacagaggagtgcgatcaatgatatattgcgatacacaagcaagaacaggttaccggatacaatgagggaacagatgcttgcacatatgcagctcaagttcaagaccgcggagttaaggcaagaagaggttcttcaagacttacctaaggccataagatcaagcattaaccaacatctattccgctccatcatcgaagaagcttatctttttaaaggattccccgaaggcctcctcgtccagctggtgatcgtccatcaacaattccattttcttttgttccttgttaaacaaggcagtggtaattcattcttctatgttgttgttgtaggtttcgcaaatacaagcagaatattttccgccgaaaatggagataatcttgcagaatgagattccaacggatttctacgtaattgtatctggaggagtggtatgatatatctatatatcctctacatactcattcatttatcccgaaaagattgtttactcattcatttatcccgaaaagattgtttactcattcttatttatatttgacttcaactgattaaaagaaaatttgcaattttaggatataattgcttccaagggtgtgagtgaacaggtaaaactctgaacaaatttcagttataagaaaaacacatttcataaacttaaaagattgagatagagtatgaagagttggttgataaatggtgaaggtattagcgaagttaggtcccggaagtatggcaggagagataggagtagtgttcaacattcctcagcctttcacagtgaggacacgtcgactttcacaagttatcagaattggtcatcataagttcaaagaaatggtgcagtctgataatgacgtcgacgccaaaatgatcattgccaatttcatgacagtaagtttacattcacaaaacggtagtaacatcaatatagtgtttatattgtaacactaataattaatgtttctttctttaatttcagtatcttaagggattgaatgatgagttaaaaaaagaaattccttttcttagagatttattagatgacgcagatgctcaggttcaggtatatataccttcttataacaaataatgcatagtcctctcgtcaaaattgtcaagtgagtttgagatgaaaacgcattttttggtgacaggaaacagttcagtcagaggaaacaccacaaagtaacgatgaggaaatagttacggtctcaagacatgaaaatggacagagtaagaagacatttttttttgttgaagacagagtaaaatgaacatgtttttttgtatgtatagagaccctttttttaacaatgacatttgattgcagtagaagagagaagaagagagggagttccaaaaagagtgataattcatggacaagctcctcctaatcaagataacaaaaacaatggtgattccaacggtagacttatcattttacctgactctatccaacttctattcgacttagctggtcagtttcactcttatgatgtcacttctctttacttatacattgaaagttttttaaaatttaatatactttatattgaactcataaaactatggtggatgcagagaagaagttggggaaacgaggaagcacgattgcaatggcagatggtgcacatgttgaacaaattgatgctcttcgagaaaacgatcatttatatattttctaattcgtttataaatatatatattcacaattatcacttcccacacaaataatgatacaaaaaaaactatatttttgttagcgtaaggtgcttatgaaaagatgcaaagtcagatatatgaaaatataaggtgaagatcgaattcccaattccactattatgaacttgcttcttatctttttgacatcttgaacttaaaattatgtttgattgaagattgcattagcatacaacaaaagtaccattgttgcatacattttagcattttctcttattactgaaacaattctctttaaaacatttgcatcaacggctacttataaagtaactaaaaaccataaaagcagtgaacactggagaagattgacctatcaataatggtgatgatcattctcaaatagggggtctcctgttcgatattcgtcattggatggcaaaactatccaacgtcactcttctccacgtcaatcgtgaacgaaatagtgctgcagataagatggctcaatatgttttgtctactactactctgtatcagtcttttattgttcctcctcgtttcttactctcttatttgtatcaaccttatacaatctaataaagttgtagtagtagttgttaaaaaaaaaagaaaataacaattatttcatattttacactgcattgtacatcaaagacttttatttgtatattcggtaacaaccaacaaaaaaaaaagtatttgaaaggaaattcttagttcgaaactcaaataacacaaaaaaataaccatacaaaaaagattagctaaggactcttttgtataattctttatagtaaaaaaaaaaaaaaagacaaaacaacagtggagactattatctaagtacaactttaaaatgtcgtgaagcttctcaagttgaagtagtctatgctctcttttccttcaaacaagaagaaaacttctcaagcagccataagaccgatgccctttccccttctgctatgcttttctaccgcaaattccgaacatgacacagatgcagatgggaggaaacttctgtaaggactcctagaaaacagaggatcagttcatttttagctggatttggcgatggacttgcacgagaaactccacatacgacgggccgcttgctgtcctgtcctctaccatatacgagagaaacaacattcctgaaaagtaccaaatatcataagaacaaatcagcatcgacaaggttctatgaaatcaacaccgagtaagcaaaaataaatgttcatttcgcaaaataatattagatgacaggatctaagctgttactattaacgtaagactgataatgtcgcaaacaagaaaagataaataacatgtatcctttgtagttagtgctaagatttggaatccgtccattattactcacctgatggttctcccttcttgcacaattttattctgagtagataaaacataaagacattggaaggattagaggctggaaaaggttcagttaggaaataaaaaagacagatactgagatttttgctagataccttaggtaagaacatctttgcctccttatttcattcaccgcatcattgaatttctttgataactgattatcatactgctgcagcacaaactataaagaaaacacaggttacattgcttagcaggcttcaaaaattccagaaaagtgatttcttctcttatggtatcaataatatgatgaaacaatcacaacagtcatatatggatcgtgtattaaaataatataaaagttagattctgtcgctatttaatcatgttacaattccatctactaatgaagagaaatattgattacctggttaggaatttcagcagctgaagaaacagcaaaaagtttctgcagaatatcagagtctactgattcgccaacaaatagtagaccgtcttcaccattctcaagaaaataaactccctcattgctaatgtgttcacttgacaatgggattggaggaggaaggaccgatccctcagtgtcctgatagattaaaaagtaagaataatcaaaactttcacaaactgtatatttaagtcttcagagatatattaaaaaaaagtagcccatcacaccttcacatcaaggtcgtgaacagaaatcattctcggataaaccaatgggattgccaaaggagtagaaagggaagacacatagttgatccagaatgatcgatcatcaattcttccatccgtccttaaacccacacttttggtcaatgctgaggaggacccatgtaaaaggaaataacaacaaatcaaattctattttctgtaaatccattcctgagaagctatatgatcctgacaagacccatgcggtatgtttcatttcatactcagtatatataagagaaacaaaaacagatagcgactagcgagtagcacaattagtacttgtaattcacactgaacaggtttccaaacatctggagaaattaaggtatctaacatgctgctagtatggtaggtaccaaatatgctacagtgtcttcacggaggccacatgtaattaccacaaagatagcagaaaacgaaaacaactgtcatttaatatctcttagaagtaagcatgcatagcaggtgaaaacacaatatattcacttctaatatcaagataagggatgggaaacaatttgcaaagagaacctaacggtgtgtaaaattaacttaaaatttgacaaaagtcacaaagaaataccgagagtgtataatggaaatagcttgagcgcctcgggaagaataagttgtccagatgatgtcactgtagcacaaaatttacggtaggcatagagtgcatttatgcaactattagttgcttgctcctttaccagtggaagtgccttcgaaggaatttcattagccgctacataaaaaacatcccaataattgttacataatcataacacggatagcagtagaatcaaaactgaaaacagtgacctaccttgtttcagcatacaagcaaattgagaatctaagtcagctgcgcgaaacaaattactgagcatgtttgtacaggagagtgataatgtggtaaccctaattcttctttctccatatattgtagtatacagaagggcgcactaaaaacgacacagaacaaacatagaataacatcattttaaatgggacaaagtaccaacattttttcgcaaggtacataaatgcaaaatatacctggaaagcacattccgctccatcttgtagtttgtcatcatgctttaacggttaccattacggctttgtcacagtcaatctgcattggcatatggcaatcaaggtttgtcaagagtaaaaagagtttataccatagtgaatctctttgtaaacttgcagcaacaattatgtgttttcctataactaacattgtgttagcttaagcagcagagcagctgaatcgtatctatccataattccagattcaacaactttcactagggaccacatacagagatatgtttcaatgatattgacaagaactcagtagacacacaatgcaaaccaaaactaattagtgggaaaatttaaagaggatccactcaccgctggtagatcaatgtcagttggaatgcgtttgcagaaattcccagagtattcttgcacttgaataccctacaataaatggaaacgatggtttacagaaaattagccttaagctggagttaacagaataatgcatgaagagaaccctctaccgcaaaaacatacctggctgcatctgactcgcatgacagcctcaaaaccctgtggcctagtaatattccatttaagatcattgtaaagcttgggaggatctgagagagctgagaaagggtaataacaatacacctggaaaaaatagttaaaagattgaaatcgtaagtgcggcaaaacctagacatcaagctcaacatggtttcgataatcagaaagggtaaggaatattggaaattacctgtcctccagtagttcttggaataacggaaattgaagccatgtcaacataggcctgagttgtgataaatatatctacacagacctgagacatttatggatggcttagacatggacgaactattgcaatgaagaaagaatgatacattgtagattactgatacgcagatggaaagattatcagttaaattcgaacataattctattggtatacctggtattcagcaaattcaatagccatggtctttagagttttgtctgctggttgtagtaatttatgggcctcctgaaataaaaagaattgcaggacaatttaatattttgcaatgaaccagtatattcttttgaaaaaaaagaaagaagcatgtttaccttttcaccagcagacatattagctctcccttcggcctctctagaagaaagtgctccaacaccaacagaacacaaaactatggaaaagatggtaatcatatcagttacgttatagaggtactgagcagtatgcttctaataaatcaataattttcaatgtgcatcgatagattctaggtgacttggaagcacatgcatcaatataccctaatatataaaatgcccaaatatagtgagcatcatacttgattgaaataccataagcttccctcctttgctcttcatcgccaagaaagcagcctagagaaaaggagttgttagacacgaaagtcaaacatgctgagactagtagatattatcctcggcatttttcccaaaaactaaaataggattcattagaaatgatctcagcacaaaacacatgtgagcttggcaacatcggtaaattaacctgaaatgacacttcattgattgcttcaaaccggattataaaatttatcattttacgccatgcaatgatgattgaaaccattaaacaagttgacaaaggtctaatgctgactaaacaacgaactcatgaaatcaagaaggccatcaaatgtgccaaacttctacttgtattgcgtatgcatctttagcaattccgtaccttaactgctgcaccaaaagcagattcaggaattttactttcctgaaacatcgttgggatactatccagcaaaagctctaggtgttgacggcactgaactcccatcaatataaaataaatacaaaaagtatgagaaagaaattacgataaccaatcttaataatagtagccagcttatacgacacattgacaaacaagggaaaaactaatcaggaagtacccaaatagaaaacaaatgacccagaactgacctcagatagctgaactacaacatctgtttctaaaggtgtatagacatcttgtacatcagggacaatgagcatcaatggctgcacaatgagcatcaaacatcttgtagatctcgttttttattttttccatccaacaattacaaaagaagaaaaaaaactagtgcaaacaaatcacctgctgcagtgcacgtttcaaattatagaagtggattgttgagtcaaatgtagcaatcccaacaaatgtcctaggaccttcctgaaaacgaatacagaaaaaaaattaattgtctaatggcgatacaaaataagaattataaagccattggtaacataaccataccataacaaaagttcacagtctcactaaagataaggacaaggtacacacgctaagagatatgcagcagaagctactctctaaattattcagatatgaacaccttagtatgcaaaggggtgatgcatgtaacaagcaaatttaaactatcactaaaaacctcaaaaggtttggacagggactgttacttaatttcaaataccaccaaaatagtaaaaaagtcttcagacacgtgtaaaccaaatagatattcagaacagggtggatataactgaatgttttggaaagttggaaatggcgaaaaaacttacaggaaggtctgaaagtacttgctggattgcattgcaagcagcggcagtagcacctgtttgtatcgcattcattgagacatcaatgaggaaaaaatatactgctggcattggatcccgtacctaccagaaaagataatgacttaaatttccatccattcccgacatgtctgatcatcaacttctcccaaaacgacgttaatattaatatcttagctagaaaggtaatctaggtggtagttcaatagatcaacagtacagtatgtatagagaaaccgttgaccacagtagtaataggttaaaattttcgggaaaacacaaaatcagaggacagaacacttgtcaaatacaatggtagattccagaccacataaaataaattggcatcttatgtagcaacaaaacaaaagaattttacatttataagcagaaagtctcacaaactaaccatgtattcttttgtagcaacaaactcaacggttcccctacacagctcaggtctttcatcaacatccctacgtctaccatctggacccagattacagtgatagtcacggggagtctcatcagtgtatcctgtgcaaaagaaagttgatgaggaaatggatcacaaagcttcccacatcaacgaactcccaagagaatacaacaataacaatatataagcatctctcttaaacaaaatcatatcaccaccttccacaattaggtgaaatccagattgacagaagaaatctttaaatacgggaaggttaagcacaaaaatgttagtgtacgcttctagcttggaatattcaattatttcataacttgatacatactattgcagttacatagctataacttcagattttgtagcttgcataactgaaaacagtaacatttaccacagaaattacagatgaacttccttccttggtcaatgaacttcatgaaaggatttatgtaacccttacagcgtgaacatcgaacaggcccaccctcaccaaagtccacaacctgcaccatagtatagtaagatgtaaatgaaaacgtgtaagtcaaagatactcgtttatgcgatcaataagaccaaattggtaaatgcaaatactaataggaatagcatagaaaccgaatgcccacatgctttgttttgtcagacaaggcttacttgtataggctcttcagatggatgagaaagcgccagcggttggaccatcaacgccagttgcattccagatgtagatagaagatcaactgtacatgggatctattacgaaaaagggaaaaaggtatcaagttcctaagaatcaaggaatacaatgagaaaatattgaacggaaacacatccgactatagaataattcatgcttcattgctacctgattgatggtacacctcatgtaacggggactacaatttccggtgtctcgaacaacataatcactagtagcaggcttgaaaaaatagaagagaaaatcaggaaaggatatagcagttcgacaaaacccccaaacaaaagatatggcatctcagactaatgtccgaattgaaatctgatcatgtatacataccgggggaggattagcctgattactctggcgagtttcaaatacagttgggctggagcttgaacctggccttgggatttgattaggatcaattcttgagggtccaggaacagtggcaccaggttggcccatggcagtgggtatgttggtcatcgactgatttggcaaaggacccatcccatatcttggtggttgcatttgaccaggaaagcctagaggtggggcaacctactaacattcaaatttgaagaccatcagaatctgccacacaaaggaaatacatcaagtgaaaagattttgcttaacaataaaaaagggagccacaagctaaagcgctacattaattgttgcttaattaatcagataaaagaatcctgccaatgccagttcaaatctttcacggtcaaaatattccaaagatcggtcaactagtatggtcctatctgctgaatgaataaaaatacacatctacatgttttcatcattccatacataggattcacaaaagttacatagcaagaatatataccataaccgtatctcgacatacctgcgctgatggtggaccataaggcaagcctgataccgctggcctgccatgaggggctccaggaaaggttgctggtgggggcattgaaggagcagtaaacggagttaatggtggatttccggaaagagaatgtgaacctagtggctgcggaggagtccgagcgtaaggtgctgaaggaggccgcacatagggtgcctgtggagttgtaacagcagcaccggggaactgggttcccctcggaaatccccctgaaccaaccatttgatgcccattactgactggaccaccaatcatgcctgagggaggcatagacatgccagatccgacaggtggaggtgaaccaaatgccattgggcgagatcctggaggaggacctgcagctacactacctgatggaccaaaagctggaaaaccactagaagaggcggcaggctgcgccactggtcctccaggcattgaaggtctagacccaaatgatggctgacgagaaggtggaccagtgggtctgttcaagggtacatttgactgaaacccagctggttgtgatacaggaggcggaccacctggtctcgccatgccagctggaggtccaggccgggacatgggtgaaggcccacgttgcggagctccataagaaggggattgctgagggaaaggctgtggtgactgaccaaaaggaggaggtggtctaggacctgagccaggcatcatcggaggtggtcgattcaagctcaagttctgcatattgtcggctaaagcatttgagttcccttgtgaacccgggtagaaattaggtggcccggaattttgctggctgttgggtctaggtgcccctggaggcacaggagcaaccatgcttggatacgagatggagatcaaatcctaaaacttcctccacaatctaaagtcttgcgaaaatcaacaaattcaagtaatcaatcagcaaatgccacaattaaagaaattgaagataaaaacactgacacactaacaatgatccgatcaatcacacagacttggtggcagtaactacacaacttcttcttagaaacaacaaatacaattgaagacaataattatccatccaaagacaagattttttattccttcagaacataaagaccctatcaagaccataaacaaaggagacgaatctagaaaacttcatcaatggtaataaactaataaatcaggaaaccgaaatctgatctaaaggagaaaaaacaaaaaaggcaagaatctcaaaagggtctatcgagaaaattgaaacacgtacccgaattgagctaaagcgacgaaattcttaagatttgactgatagcgatccgagaatattgatagaagctcagatctatggaacagagtgagaaagagagacacagcgacagcgacgacggttaacggcgtcggtgtctgtcacaggattcagacgactgataaaaactaaaattttgttgtccgtaagagaagacagaaaattcacattgcaaaatttcaacaaaatgcaagggtacatgaataaaaaacgttgaagagttggaacttagaaaaaaaagagttatcaatttgactgtagtaaaccagactcattcacacgtcaagtttggttcaatcgaatgctagaatttttttggtattgttatgtcaaaaatatacaaaatttattcaattttattttcttgttaaaacgccattaaatatctttaagtttatgcgcaaattgtatatttaataagtataagaatgatatgaacttttaaaatatatattaattgaaattgtgatactagtttgcgtagttaattataactttgtaagaaatatttgttttgttgtttacaacttacaatacacttaacacatgcacactaaaatctgattgtcaaatggccaatagaacaagctctgtagataaattacataagttctataatctttttattacaaagtaatatctttccacatcaatgttcatttgatcaattagcaaatagtagatgattgaaacctctgtttcatcgtcaagcaagtcatgttttagaaggattatacgaaatctatcccatttccgtaatcagaaaacttctgcattaagctgtttctcattcaaagggatttcctctggatacataagcatttgggtttgcagaaggatatccattgtttgcttgatgaaatgtatgtactccgttgaacgtatttccttctgtaccaagaccactatactcttgcctttgcacaccaaaatcaatttagagtcaagaaccattcagtgaacactaattaagaagagtcagagtatgtatgtacctgaatgatggggacatattcacctgtgattgctgccccattagtgcacctgttcaccagatttcaactcttagaatataaactccaaccactgaaaacagtctttttacataaatttcgtctcaccaggggaaagatgggatgcaagagctggagagtttggggataaagcggttgcatgaaaaggtgactgagaggtcatcagtccaatggaatctgcagctggacttgaagaatctgaataccctattggagatgacacgtgaggtaagcctcctccttgcacatatgccatagtaggaaactgtaaaagacatagaaaagagaaaggaactgagtatatatatatattcattttcatcatatatactatcaggaaattaactctaggattcatacttgtggtgtttggtttggagctgtatcatcatagctaagatcaaagggatttgctgcttttgctgtatatgttaaggctcccatagcctgctaagaaaaaggacatatatcagcataaaaccagatgctgtaataattatgtcaatggaacatataccacaggatattgataatattgcatgccatatcccatgccatgatgttgaccatgaacttgctgaggggcaaatgagaagcctccagtgaaaaggtcctgccaatggttagattcttatgatcagagattcccaaaagagtatccaaatttctgttataagagaagggttcgttacctcaggaagcgcctttcttatgctagattgtgtctcatcatcttgatgatgctcagatccaactccatgagcataatctgtgatagccagtgttgtctgttccatagagaaatctgatggtcccttagatgatatatgtagatgccacatgtgtttgcaaagggttagcacatgaagagaacaagttttattgaaactatagtcttttcttctttttcaaagtctgtaaatgatccggttacatctactgttactaacagttgatgcagcttaaactcctgaattcaagaaaatatttgtaaatgtgtgtttaaaaactgctacagagaccaacctggttatttgcaagtgtagccgtctcttttgtatttaagttatcaggagcaacaggtaccactggacctgaagaaccggaatgagcatgtgcagttgttggtgatgtggcaaaagaggtaacactgtctggtattcctggcattgtctgggtcccgaggttaactgcggtatagttttcagtagaggaaatatcacttgtgttccatagttcatagttgtttgttccagggacaacagaaggaacagaggatccaaacaacaaagcttccaaagaattaggagctggctcctcagtggtctttagagatgcaggaatttcacttgaattcttaataatgccttcatcagatagttctgaaactggtacatcatcaattaaacttctaggaatttccattttctcagatgatgcagtcatctgcaaaatgcaacttgttcacatattaactctagacaaaatgcataaaacaaaatgcaatagatataactgtagattacctgattattcactggatccttctttttctcaacttttacaatattgagttcgctggtatggcgtacaatgggaaagcttggcatgtctttgttacttgagaggtcaagtgatttggagcttcctcttgaatctttacgtgcatcatatctcttaacactcccatcgtctctaaacctatcatcgactatctcaaagcgaataggactctttggtaaacctctagaccttggattatgcgtaacatgttgttgtttatggttcttgtcatcaaaataaaaccttagagattcacttccactcctcccagcagcactagatctttcgatgtcagatttatccacagagtgtaaacttctagatccgagaacatgtgcactggtcttcttactttccctgtaatcttctgtgacatcctaaacattgtaacatataatgttgtcccaaaatgagttgcaacacttagcttcaggtttggctaattaagctgaatcaagaaaaaggtaaatgtaatgaagcaagtaagaaaagcagtttaccgatttctgctgtgagatcttgtcactgctactgtatcttttgtccacataaacactcctgatgaaatctcggagcttgaaaatattactgaacaaaaagaaagaaaactgaggtcaacatataaaaattttgctactcctagtgttaacttggctgagattaataaatgtccaagaacctgcgatcggggtaaccatcacggtgagcatcccattctttaaaataaatttgtctggctcgctgcagagaacacaatgaaagtttacagtactagaagatggatgattgagacaaaatgagaagctcaatatcaaacctcgtttcctcctgcgcgaagtgcactaacttcgtctgctgtgaacttggccattgatacagatttaacacgatgtgtgaattctcggctgcaaatatatacaaaaagaaacacatgcatgatatgtaatttggaccaacacttgcaagtaccagagtttttccttggattgatagagaaatcaaaagaagaaaaatgaaaggagaagaggaaaagacttactggattccgctgcagttaacgcagacaaaagtccagaaagttgagcatacatattgtggaccctgcaaagattcacatgttagacaacaatgagctattcagatggatcattggctccaacaaatgaatgtacgtatgatcagctaaaaatgttgtaccaaccagactattgcaattgatgcatctccggttctcaggaagcttcaataaactccggatagccttttcggttcgctcgtcttccttcattcttggaaaaatgcctctctcatgaagaaaaacaatatctcaaatgagaaatcctatcaaagagcaatgtcatcatttacctgagaagaaattactatcttaagccaaaaacattgaggttattctcgtgcatctttaaatccttaatcttacgttacatgcgagaaacatgggaaattttaagcttcaagcccctgatgctctaaaatgttcaaacaaacaaaaaaaaaaagagaagagaaaaaccttacaaaaagaagaggaaccagtcgaagaagagaatttggggtggaaagaatgatgagaaagaacttctctcaggaggttgtccaagatatgacaaatttaggaaataagtaacagagagatcatgaagccagcaaacgaatgagacatcttccgacaaaactgctaacttcaaagatttcccgccgttggaatttctctcaccaccttttcttctctctcatttttcccaatgttttacaaattataagagaatactaaatttttggaagagtattgacaaatgtgatttgtaactaatttttgtaattatatgactacatggcaagtgttgcaagtttgacttcgtttcaatatttttcaaactttatgatcttgactaaaattgaaaagaaggcagagaagaaatatggagaagaagagcaccgcaaaatacttgcagtagaataatcttttttttgctcaaactaaatctctctaccaaaagaagcctaataaaccaaattacttacaatctcctcttttcttttttctctctttttttttttttttttttttaccatctcctcaatttttgtctctcttcttaacctactaagaacattcccagccgatgggtacatgagatcaagtttcagagtcccagttcggtgttattgctgcatcaaaatatagcttacttaaagcagagggaggcaaatttctgtacagtggagctcatctgggtcgttttttaattcgtgtcaagaccagctcgtgtgttgaacaggacatgtcgaatcactatctcttcttttgctcaagaggtgacaatacccagacttaacaagagtggtatctattgactcatccttcgcttgagctttctaccccattgttgttgcctaggtcctcggaagaagctttaactgcctctgcacacatgagagcagctgcagctttctggatcgctagatctgctttgtacctcaaactctctgctctttcccgcttgagcttcgccaaagcgcatgctcgccttgcagcaccagctgcatctcgcaatttgtactcatcaatgtctgtactattccgtattccttccacatcaggacgctgagatccgttggagtaacagacaagattggaactggggcattcagaatagcctgcatcccatcgttcactcgtattcctcttcccattgattctttgcgacttgttttggtgattcctatgatatccatttccaccgctcgagaaatatcccatgcctaggtcacgaggggaatatgttcctggatgtacagaaaattcattcgagtgctcatagctttgatttgaatataaaaacctctcgtcgccagagacaaaaccaacaggtcttcttcctgctagagaaatggaaaagttggattaaacacagacttcattttgaaaaatcagagtcaatagaggatttatagaatatcaagcaggtaaaaacgagttacctgatgaattacagccatcataatctcccaaagcagaactatgttgagcataaactgagagtttcttctgtgacctgtgttttgttcccctgtgtttgacttccaaacctcgaggcttaaaacagaaagcaaacatcgctggcttctcagtaggtgactgtttcttctgcgacccacaggaatttggagtgtttgctttgctcataaccaactcccagtctttgagctccctttgatatttttcccatagaggtggctgaattgcaagggtagaaaacaagtgtttacgttaggcaaaattaaaaatattgcagcagagtaactacattattgttgagctagcaagtaagactaatcaacaaggagtaaaatcaacagactatagaagatgctacagttatggacttccagacatcttcgtgcacaacaaactggaatgcaaaaagatgcaattttccccctaatagacgttccatttgcataaaacacccacatcattcaatatcctgaaaagaacactaagtaatacctactactagacatagccttattgtccacaattctgcatttcccccgattccaaaaagatctatgttgagcctagtcatgcagatttttaaatctcaagaaaaacatgaaaaccaaataaataataaaagatgaaaaggcatcagagattgtacctgaagatgcctgatcaatggcattcccttcctctgcctctttgttctccaaagctcatatattgtttccattgcttccaaggatccaactccagccgtcaattcttgaatttcgattaaggtaaagttatcacgctgctttacaaatgaagccttctcaaacatgtccattgccttctcaaacatgtcctcagtgatctcacaagagccactattctcagcactcgaacactcacgaattctcaaaaggcactgctcatcatcgctgtccatgtcatacataacacgtgaaggatctaatgccatctcaacatcagtttcagtctgccgaaaatatttagaagaactgcgaataaattcagtttctgttccatcaaaattatccctttctatcatgcggatgccaggaataggaatatttctaactaaagcagcccgagtatttctattgtagcactcttcatgcatctctttaaaaaggaaccactggcccctatcagggaactccaaggtccaatcttttccacctttccacatcatagcatgtgtaaacctattcactgacccaggttgcagaaattgatgtgccctgtgtgagtattttgttgtccctgagatttttaccgcaagtctccattcattattatcaaaaggttccaggaaaatctgagctccatattctcgccagcctctatcaccaagagtgactaatacattggcatcacataaactagactcgagatctttctgaatacctttggtaacatcagcggtagaccttctaattcttttgttcggcatccccttgagcagggaacctttgtttctagaatcagaacccccagaaggcaatgaataagacacttgggtacgtcgcttcttaggtccatttgccaaattagtgttcaaaaagtctccctttgaatccgaccaaccatgcgagagatggccatttaaagaacttttacttcggttccacatacttcttggggcagtggcctttggacttgagttgctactaccttgaatattcaaggccagattacttgactgcggagtaccatcctcacaatcatcagatattggaacttgaatactaatcccattcaccgaaacattagacctggtttcatgcttatgtctgacaacagaagaactgtatgacatccagttttcagaatcagaccccagctgctgactttgagacggagtatgaaggtcttttgactcttgcgctctggaagaagtgataattggttcatcagtttggctcttactcttgagagacagttcagaatgctcatttgtaaaatctgccatatcacaacctctatgtgttaccaaatcgcgttctattcctaggaagtctgctgaatcatgacccagctcccttatcatgttcaagtgtaaactgagtaacagtgtaggtggccgagcagtaaaaagaagtgcaaatggagacgtattttgcttcttgtagcaaacagatgtgggccacgcttcagcagatgatgatcctctagaaacaaggcctgagctgattccatgcctagatctcttctgcataacctgatgtgcaagattaaaaaaaaaaacgaattggtatgagataatagaaataaaagtataaccaacgaagcaatgtaccagaacattcattaaagaatcactgtaccttctgcaggaccttcatgttattgtgagtacactctgcaattgatacttgcttaaccagcaaagaatgtctcctgacattctgttccaagtatgaccactttgaatgtttcacctcatggaaactgtagatttgaaatccaagctgcctttggaaacctgggatgcaagaaacttggagaccaattgagaaaactggcaactgcaagtcagcatccgctccttgtgctccttgcttattagaatgatctactaccatcaagatacggaaaatcaattgaacaacttccattaagcagccttcaaaaattagataccttaacccatcttggttattcaggaaaatcatttccaaacgaactcttggccacaaagtcacaagtgtaccatgacgaagcaaaagagcagcacgtgaaagccagtcaacatcggccataagaaagtagctcatcaaggaaacaccctgtaggctgagggacaactcaaattgctctgattcattccacgggcaacaaagctccagatccccagaatcttcaataggcaaaaactctacaccaggatccggactttttgatacaagaaactgcttcaaaaactcaacactattgtaacctgactctttgtagatatccttctttgctgtatgaagtcttctcctacaatagacaataggaaatatgctaccattccgaaaaccagagctttccaactcgtttttacttggtccaggtaatccacatgatgcaagagaactagccgatctatctgtgacatccccattcattttaacagattcattagatgtcattacgtcagtttttttccgcttttgtacagccttaagagtggaggatttgtcccgatgtctagaccgagccaaccatgtgatgattggctctgattccatgcagctatcatcttctagcttttccttctgcttctcctcgtctttgctggaagtatcattcccttttactttctgagtagactttgactctgaacaacgccttttccgctgattttttccaggaacttcagaaggaaacaacagaattttgaatctttcaccctgtaagttgatccactcctcatcacgatcatcatattttacatgatgcaggttcttgtctccatcgaaaccatccacaaacccatgataccatctctcatccaatggccagaaaactttaatctttttgtttaacaaccagtgtgaatccacatctgaaaacaaaatttcataaaagtggcgtcttttccgaactttacccttcccatcatcattatgtctccttggtcgcaacattctatcatcagtgtcatctgagacacatttagaactaagcaactcggaccgaggatcaactgaattcttaccagaaggcaatggatgcaatctactcgcagatggtgaaccaggagtaacagaatttgaaggaaactgggtacagtttggatcaaaccgtgaagacagcattattgcagcattagcttcaagattctcctcatcatcttcccgtgataccttggatattctaccagaagcatcacctgaagacttggcctcttttcccacgcgtctgtttgatgctgaggacttcctttttctgctgttactatttctttgtttaacaacaaccagctgatcatctttcactggagactgattagaatgcccattttccaactgcaacggagctgcggaattagattctttgatatctttgtcagagtccttctcttcaactttagagggttgatcctgaacactagattcttcagcagtaaccttagggatattaacaaccagctcctcctgactatcagactcccctgcagacttctgtgctaggccattctcaaacctactcctcccaacaaaatctctcctgcgtctaggaacataaatcgtactacttgccaaaccaacagaaatcacttgaagcccattactgtcacacaatttctcatccaaacccacctccttggagtcctccaaattgtgcaatatagtggtgccattgcatgccttatccagaatactctcgttctggctacctactttcttaaaactacttagagaaacaactttcctgctcttcttgtcctgcttcaactgatcaccatcaatcccagacctatgttttcttttaaagctcttattcactgaatccttggaaatgctagacttatagagcgtcttaagatctaaagacctggatttcttcgaaattcccactccattagagttacctagtctattttccatgaaagccacctcgaaccaatacccagaatcaaaagccagcaggtctcaaattccatcatatacgcaagcaaacatttttcagatctgtgacaccaaaaccaaacccagaatcacaaaaagtacccaaagtatgataaaagaagaacacacaagtcacccaaagaaacagatcaaatcccacttcaggaaaaaactttgcattgaaatccaagcaattgttttttcaacaatcaagcaaaatttaactgcaaaaaattaaaaaaaaaaagagagaaatttgcatgcctacctgcatcactttatcagacgaaatcgagtctcttaaggacctttatagtcgccacaatcccaaaatcaaaattagggtttcggtaaatcggactgcgaatcggatccctaaatcaaacaatcgaaaatttcccaaaagtattcgttcaatttagccgaaaataaaaaaagcaaaatttgcttcttttttttttcttttttaaccgggagaaacgggagagctagggtttcgtctggttccgcgagagtaaggttttttcagttataaagaaaacatattccaaataaacatcgtatcacgggtaccgtccgatggagacgcgttactatatctacggtccatatttagtttcgaaataagcactaaatttttaactctgcaacagaaaagatataatggacgttcgagattctcagctgcgaaatatttgtttggacggtcaggatttaaagatttcttcagagagaataatttattgttgtcacgtgtgttgctaacctaccgcaatcttgtgtttgtccacctagccaacaattgttagagacatcattcaacttaacaactattattactagaatactaggggataatttaagtataaaatcatcacattacagtattatctttttaataatttatatatatatatatatattattgttattttcttttaatatataaacttcattcatccattagcttaacaattttccaatattttgtaaaaatatatatatacatattattaggagttttcggaccatatttaagtattagtgtattactaccttattatgtgtttaaatatatatttttattaaatatagacatatagcaaaaagaattagtagtagagagattgattggaatcaatttttgattaattatatagtgtaaactaagctttaagaatatttaaaaaatagatttggtttccttataaatatgaattaaggtcattattaacgtatcataagatttagagcaatgtataaacacaagaagaaaaacaataaaagttcagaaattcctttttcgattcaaaaatacgttaaaaattgacaaaatattttggcgggtggattgtatattggaacccaaaatttgcttttttaatacagaaaaataaaataaaattggcttaattggaaaaactaatattgagttcataaaccaaattaaggtttaattagacagtctaatccaatgttcggttcaattttgtaatcaaatgttcggttcaattttgtaatcaaatgttcggtttgatgatccataagagaggagataacatcccaaatagagacagatccccttcccttgtcgtgtagcccagtagctctaatcgctacgattgctacacaccacatcccttaagaaaaccctaatcatctctctctcgcattctataggaatcgcttcccgaagcttccaacattctcttgtttctcctttgtctctcaatttcagtttcctatattatacgcttgtattaatcaccagtatacattttgtcgtttctgggtctggaaccctagtagttattatagcatccatcgctttcttcaatcgccgtccatcagagtttcaagggatttgctttaaagatcaatcctttcctaagaaaatagcgacaattcatcagcttttcctttcccatccttcattaccttaacttactcgagattcatcttccagctgaaattgtgaaacttcgtttctgggtttttatcagaaaacactctgtgacttattgtgtggtgatcgaggaaagaaaaaagatggttggtggtggaaacaggagagatgagggatcgatgccgattcagaacaccaacttgtttgctgctttggatacttcgaggaagaagaagaagtctgataaggctggtaagagcaaagcttcctctaagagagaagattcacagaaggagcctgagccacaggttttctgggcacctacgcctctcaaagcaaaggcttgggctgatatcgatagcgatgatgaagatgatgattattacgctaccactgctccacctcagtccctgtggagcacttctgaagcctcccattcagatgctaaagacgttcccgctgaggtcacaagtccaaatctttcatatatatgttgattttgggttcatcatcatagctttatgcatttcacatgttgaaaattgtaacactggtttaatatgtctcttgcaataagcctctttagatttcaaatgcttccacgaattgaatgagttggcctttttttctactgttgttatctcgcttaggcttaggcttgtgttgtctgaattctgaaagggaaattaatgttattgtgaagtaagctgctttgtctcctgaaggttcatatatctaattgcattgttatcgaaatttttctaggcaatgtaagtttgttgtgcaatggtttctctaaaccgtggttgtgtgcctatctgttcatttgtttctcatagagatgcatttgatttcaatgtcgcaggaaattgaaagcgaagaagacactcttgatgatggagatgatgatgatgtggaggaagatcacgagcagggaacagagacacaagttcatccagaagcagagcctgaggtgaaaaaggctcctgaagttcgtgctcctcctaaggaggcagagaggcaactttccaagaaagagaggaaaaagaaggaacttgctgagcttgaggctttgctagcagattttggagttgcaaccaaagatgagaatggtcaacaagactctcaaggtatagcacaatttcactttactatattcactcgttggtaacaattctactctactctattcactcgttggtgatatttatctgtggatacctttctacgctgaggtatcactggctgagaaaaccatgttatggctaatactgatagacgtttcttctgcaaatatgaacagataagggggagaagaaagaagtgaatgatgagggagagaagaaggagaacacaaccggagaatcaaaggcctcaaagaagaagaaaaagaaggacaaacagaaggagctaaaagaatcccagagtgaagtgaagagcaactcggatgctgcaagtgagtccgctgagcaggaggagtcttcttcttccatcgacgtcaaagaacggctaaagaagattgcatcaatgaagaagaagaaatcaagcaaggaggttgatggtgcttcaacagctgctgcaaaggaagcagctgcgaggaaggcaaagttggccgcagcgaagaaaaaagaaaagaaaaactacaatcagcaacctgtgaggtgaagaaatcaatccacccaccgttgtgatatgaacataggttttgttcatatgagacttacttgccttgaacaaatcttttgatggggaatgtggttgggtcgtgttttagagttatgataactttggatcttttaatcctatcacaatggaacatgacaagaagaaactctgtttgaatttttccttttacatacattctttgctcatcatggttatacttggatttgttttatctcccacaacaatttctacttcttgatcttacatattattagttgtggctaagccagcgcttaataaagttaatctatgagtctgaatcgacaaaatcaattgattattttaattatatgtttatcaaacgaattagatcatatttttgacaaacctaaataggtatatttctcttgcggtttattcgacgaaaaagaaaagttggtacagtatttattttactctcttaagacaattcgtcgtgttgcttgctactctcgacgacggagaagtagaaatgtggagaagagtgatcggaaatgtcgccgtccggcatcaattacagcgagcgctatctagtaaagccggtggaagtggaaagagcgccaacgtttcagctgcagtggattcgatgcttctgcgttccctcaaggaacattacttagaggtttctaagatgactcctcctccggttcgttcctcctcttctctctctctttctgtgttttctctctatgtctcgtcttaggtacaactgaaatttcagtactgttacttaaaccctagcttagctgctgcttcctccacttagggtttatggtgggatttacagatttttgattgattttgcagaaagtgagtcctccgtcaccatttgagattgtgaaagggtcgcttgaaggaagtactggtgctgttctgaagaaatctgttggaaatgaagagatcaatcttttcgttatgcgcttggctcacggaggtgatgaagaagacgatggtgggatcaaccagttgttccttcatgttgctgtatcaaagccaaatcagcctgattctttgcatttcctttgtggcctttaccctgatgcattgggtattcattctgtttccatgaggccaaaacttgaggctttggagatgtctgatgatcctactcaatacacaggcccttcttttgagtgagtttctctctttttaacttctttttagtgagtttagagacttactcaatatatgcttgcctttctagttattcagttgatggttgagaccttataggtgattcatttctgttttgagctgtctcgtcttgctacactcagagctctcaaactaagaataggccaactaagtatatcgtcattcttaaataatctctgactctctcaaggatgattttaagaaacagcttatctcttttgtaccagttattgaggaatgtgaatgtagaatagaatggtggtagatgtgttctagacatttcgatttttcagtttcagttactgctcttcctcatgtgacatatttgtagtgcagtctcactattgacacacaatcggtttgtttctattatgaagcctttgaatcaaggatttgtctcttgtcatgttccttacattcttctctcattgcatttctcagttttaaagaagagagtttgtgcatcctattcagcattctgttttctctgttctaaagataatgcgtaacttacaattgatagaaaattcactcgattggcaagtaagtgtttctatttgttttgacagagagctcgatgagaagatgagagatgtattccatggattcctagaggaacgaggtgtgaacgagagtctcttcccctttcttcaggcatggctctatgtaaaggatcaccgtaacctactgcgatggttcaaatcagttggcacgtttgttcatgaaaacccatctgcagaaaacaccgcctagaaggacgtgtcttttcggtctctggatcggtttctgcggttaatttttttagtatggcactataccgcttttaaatgtttcaggaactgaatcacttttattttcaaaccatttcaaaacatatgcatccgagattaatgttaagaaaaagttctctattcgactgtgtgagctctctctactaaaggcaaaactattatgatctttatgcttcttgtaagttaccggttctcacactaattttaccgagccaacgagtcagtgtctagtaattcaaaaactaagataacaaaatcgttgaagccattaaaagttttgtggtccagtataaaggtataaatattttatttggtttattctaatttttcgcagagagaccatgaatgaggcactttagctgcacaaggtctcgaaagatccctggctctcgtatagaggtggtactcgtgacaaattcagagaataaataaaaacaagtatttggaacacgctcaaactcaatcaccgattctcgaactcttctacactcaagaggttccaattcacaacggcaaaaagcatttacagaacaggatcttcgccgtgtctttcttcaccttcttagcaatgagaagcaaaccccattttgtgtaggaacatcgccaaacggctaatttgccgttttctcggacatagagcaaatctcgaagatctagataacattattggccaaaccattctcaactctaagttcactccgttgttgttgttgctgttgttgatggttatcgttttccccagaagagagcgaggttaagatcccttggctagtcaaatcagagttcttctccccaacttcgctcttgcatagagggcaagaggcattgatcttcagccatttgtcaacgcactctttgtggaagaaatgtgagcatggaagctctcttaactcctcgttattcgcatatttcgctaagcaaatgcaacagacctgcaaatatttttatattcagcaacttgattgtatctgtgtgtttatgtgtaaattcaaagtgtaaggaaactcactgcgtcctctcctgaaatagctcgttcgttatctgttccagccgccacaactccaccttcgctagtacttgaaccattgtcatcgccattacttctgcttttcttcaacttaaatttatgagtcggcaacgcattaatcgactcaggtgtggcacctcgaggttgcgttaaatcttctctatatccgagaattgagattatgcaaggcaagcagcaacatattgttgtacagaggatgaagggcatcgcgtagccaatacagctaaaggtaagaaacactaaacataacctagaacatacaagagaacaaaaatatgggtcagtcttggaaaatgcagtctgatgtttgagtctaattgctgtatatctaaaagaatatcacctgtacaagttaggagcctcggcagcagatgaatgccctccaaatatccatacattacctaccacaaaccacaccgcaaagaagcaatccagagccattttgaagtattccacgataactttaagtctggaagccaaaatcaacgaccaaaatcatactgactcaattagattgcagatattttcaacacaaagaaaaagtttagaacaaaagagacatctaaactctcaattctcaaaaataagaaaagctttgagagaaaacgtaattcaaaatccaaactttcagttgaaacagatcatctaagaacatgtgtgtttacctggcagcacttataaacccaggatatctactaccacgagaagaggtggtattggtctgtcgaccatctgcttcggatgtcctggatatcgagaaggcgaatggtcctgctgcaacattaagattaggacggtgctgaccagaatcctgttcagaagcctgattcgaatgataatatctccagtacaaaagcgggagtgtagcaacgcatccacacgcataaccaacaatccaagtgaacaaaggagcacgaggatgctcatgttttgacaaagacaaaacgacaatagctgcaatgatctgaccaacagtgaggaatagttcaatagaaatccataagccagaattcaaaggacttcttctacgacggacacttctaggatttgatcgcatagaagaagaagaagaagctgtagctgtagctggctgaggagcagccatgggagaaacagtagaaggtctctcttcctcatgttgtaaaggttccaaaacatttgagattctatcatgagaagatgatgatgatgcaatggcggcatttcttggaatgtcaatgatgatgtgctcatttctgcttagattattctctggtgatctttccatgaatctagaaaaagtatcagcttgatttgtaatacgatgttgttgtttcagaagagaaacacccatctaggtattgtccactttgcgcataccacaccatggagcttaaccaaaggtcctgcaaatccacaaagaaagcttaaaccctcaaatgacctaaaacaaccacgaaaaatcatcaatttatgtctgtttcaagattttgactcatcagaatcgaccaatccaagcttaatcatacatgaattaaaggaaagaaactcacccagattataccataaaactagggtaaaatcaaagaaaaatcgtaaaagggcaaagatttatcagaagaacagaagcatataattggcgcctgggattaatctcagaataaaatcaagcaattaggggaaacaaaccttcttcaatgggggtgaaatttgtttcttttctcgctggtcgcaaggtgtaaaattggagagcgccgcagaagaagaagaagaaaacccagaaaccaagacaacgaatcaaattaagaagagtcaactttttcaacaatcgaaatcctttgctgttgttgatcgtgtagcttcttcaaatgtattttgcgattattttagatttttttttttgtgttcaccgatcaaccaaggggagattaaaaaaaaaaaattatggatataaaattcggagccaaacagcaatcacacaaaaactagtattatatataaataaatgtacaaagaaaaattcagatagtgatgctttctttggctccttcctctttatattttccctcaacaagaaaaaagtaaaaagtaaaaatgagaagatattgctttttgactttacccctgttttacggggcggcgcgtaatctaattagatgttctgaaagttgtctcttcggtgacattcgataaataaagtgatctgaaagttgtcaaagaaacggttcgaatactaaaccaagttcttattttttagaaacacgttttcaaagcttaagaaacaaatgccattttcagctcaaaaaggtaaaacatgctactgattttcagatcatcataaaaacacttcctaccgaatcttctgaccagcttcactcctaccgtatctttaagcaaattttaaacatttcaatcatgcgagctagttgatagtttctctcttaaatttcactatcatggcaccacatatccaagaactaaagaaaaatacgtctagacaaacgaatcttccattaatacgagacaacattcatacagagatgtgttatatacacataaatctgagacaaataacctttacattaattcacttcttccactgtggaatccgctgcacgacaacctatatccaaagccgacttttctcaatgagaaagatcataaaaaggaaaaataaactcttatgatcccaaataatgggcacattagcgtttgcaatttgcatatgcataaattggtgtatgaaagtaggtacctttcctgagttttctttgttccctactattgtttgacatgcgagtctccaagattccggcttctgcacaatagtaacaaaacccttaagatttaaacagccaaggctcttattttatccaaaatttgcatatctaagaaaagttacttagtaaccatatcagacaacaaaacatatattcacatttaaccagaaacaatgctcaacatttcattcatcttgttagtgcacatacccattccaaacactagcaatgagaaacttgtgaatctaacaataatatagagaggagtgatcaaataactagcctttttcaggtaccggttttctgtatctgttctctcattcagaagatctctgccatcgagtatctgcacacaagaagaccaaatgtgtatttttttgctttgagttactggtcatcataagaagaccaaacacaaatctattttcctccattgatatccatgaatgctagaacaatcatagctcataaattcataatcagaatctaattaacattgtatgaagtcacttgcctccacaatgcaagttccacagcttcctccaccaccacagttcatcactttcccctaatcatcacaaattgaccaaaatccaaagtttacataagccttcaacaaaccatctcctcacatcaaaatctagaactaaatattttcattgtctactaaattattccagaaactagttcaaacatcaaatcaatcaatgtattaagattgagaaaatctgaagttaaatttcgtaattaaagagagagaaatcaacataactcacgtaagcagcgtagagttcaattttgttatcctgcataatgcttctgagaagcttatctccactcacagcctttgctttatctaccggatatgacccgtcgctacccggcttcggctgcaaagaaaaaaacgaaaagtctcttctgagttttgaaacgaattgtatcaataatcgacgagaaaatcgcgccgagagttacaccgaagaactcgagctctatctcaagaggcgtcactgcagaaatcccctgaggagatgatgcttgagaagaagaagaagaagagctgttacaggagattacgcgagctcttccacctccggaaacttttcgatgctgctgaatttgtgcattggagaaggtgaagccgaggttgaaacctaacgaagccatttcttccggctaaatcttcccgtgttagcttccgatctccggcgactttggtacgaagattccagaaactaaagctaaaccacgaatttaattatgtggacttcatcttctacatgttataaggctttttgtctctgttgttaacccattaacaagcccatttaacttattttcaatttatatcttcgacttatctttaaattataaattgaaaagacgttaagtgggccttttagtgctaattttttcaagcccatttaacttatttgagtcttggaatatttcacttggaaaacaatgcgctaattccatctcctataatttccctgtatatattttgagaagatggatggattgagcaattttaaagacaaatatttatgtaactaaaaaattattcttaactttctgatgatttatgtctgagggaagcatctagtatgcattgtttctgtttcatgtgagataagcaagaaaagtaagtgggaaacaagaaagcagaacagtgagattaccaattgtgcaaacaatcatatcatatagtatactttgttcgccatcttactgtcacttaaacaacaaaattcactatcatcgtttagcggattattttcaactatataacccagtaaaagatagtttacttgtcatgtggtatatttgacagttatcaaacttttgagagtttgtgacacgtacgatacagacacaaaatcaaatctccctctccgaccatttttttttcttagttacataaatctcttttccttctccagcaacagaagaattctgctcgataatagattggtaatcacaaaaagaaaagaaaaagtgttggagatccttccgagagagacgcgacatctccttcctcttcgaagatgagtggtactgtgaaggatatcgtttcaaaggaggagcttgataacttgcgccacagcggagcaccactcgtgcttcacttctgggcttcttggtgtgacgcttcgaagcagatggatcaagttttctctcatctcgctactgatttccctcgtgctcacttctttagggttcgtcgtctctgttcgaattttatctctttcaattggtttttgactttgattggttttatttatcttcttaggtagaagctgaggaacatcctgagatatctgaggcttattctgttgctcttgtgccgtatttcgtcttcttcaaggtaaactttaggcatattgattctttgtttggttgcaattttttggcttattgacaaagcttgaatctttgtcactgcactgaatccttttcttattgaaggatggcaaaactgtggatacacttgaaggggcagatccatcaagtttagctaataaagttggcaaagttgctggttctattactcctgcaagcttagggttggctgcagggccaacgattcttgaaactgttaagaagaatgcgaaagcttctggacaagaccgagctcagcctgtatctaccgctgatgctctcaagaatcgtttggaaaaactcaccctgttatgttattcatgaatggtactcctgaagagcctcgatttttaatatctattgagtactttctttatagttggaattcttgtggatatatatcaggtagctacttggagcaaacatgttgctaaagttgacctgctactgttgtttgaagaacacgtgctatgtcttgtcgttgaaggaattatgttcatatgggaagaacataagcctactggaaagtttacccctagctctattgttaacccagatacttgagcctccatatcacaaacatctagttaaggtttgtgtagtaagaacaagaaaaacaacacgtgttcccaattcccatataaatgaccattatacttctatcaacccaattaatcacagtccggagactagttgattaaaaaatcagctaatactaatttggtggtttcaataaacatcttaaatactccataattaaactagattaaagtgggaaaaatcgtcatgagtagttgtaaaatcgatttcatttaagagtatagaaattcgtcatgagtggttggttcatgagttctctctcttactcatattagagtaagaaatcaaacacttataatcattcaaaattcaacaactctcatctcaaaaccatatatttaggtaaagttatatgcatacattttgcattttaattttaaaacagattatttggcgcgtaatgataaaattatgtgtataaaaattatttaactaatcgatctaacaaccacatatgagtaaagtagttaacattgtactactacaccaaattatagtgtgttggttagattagatacacaaactcactttctcaaatcaataacattatgaatctatgataaccttaatttaaaaagagtctataatgccatgattttacaatcgtacttttttcttttgggctgaacttttaatcatatattatttgaaagatgtgattattataatattaaagggaattaaaatcatgtaagagaaacccaataaagtagcttgaagaagaaaaagacaagctttattatacacttacccagaaaaacaaaaaacaaaaaactgataatatctctctctctctctctcgttgagtgtgtccatgaaataatactctgccagagacagagagaaagactgtaacggaggatgtggtggcgaagtggccacactgacacactggtttcatgatggtgaaccacaacaatggccagcgacccactgatattgattctcgtctccgacagacagaacaagataagctcttgttccatgactttttaggctccaagaatcctactttagcatccacttccatggctgaccataggctaccaccggataataaggcggctaaagcggcgatgactccttccacggcttctgcttcctccgccggtggactcggcggtctctcctcaacctccgatctcggttctgctctgtctctctatctctctctcctgatgtttttgttgttgttgacgtagtgtgcttacgctgatgaggttttgagctgattcctctgtacatttagggtttctatctatagaaagttcaacttttgttacatagattcgatttaaagttggattctttcttttccccctagtctggattaacgatcgagctttgattcaccatgatttgaaaatgtaagagatcatgtgagttagtttcaaattttttagtcaattcatttatgattagatctcttaagttgaaaatggaacatctttgggttcataaggttgaacaaaatgtgaatgtacattgtcttgtttcatttcttgcctcattgcttttttagttcgacaatttaagaaacatgaacatggattgtgtgtgggcatgtggttgcttgacctcttgtagtgttaaggactctccctctctctctctctctctctctctctctgcccaaccataatgccctctggtggattagttgggacattgagagtgaatttgactgatgagtttggtgggtcatagccatttgaggttgtgatccttttttatatgaattggcccttctttattgcctctcgttttctctctctatctccttgagttccctcccacaacaatctttaagttacttatccatattttatcattgtttagtcgaaagacacagcggcggtgggaatcatcttgatgggatacaattgtttggaccaagaagtgatgtttctggctcaatcatgagcaatcggttttcaggaaataagagaagtaactctgattctcacttcacgactcaggagcacccagagactctgcattggtccaaggtaactaaaaaaaaaacagaacctacacaacttcaccatggtcacagctacgtagaactcagtttctgtaatatgtcattgtcataacctagttgcttagaaacggacctggaagcttctccatgaatgtgaatcctttggcaaaccagcctccacgcggaggaggacagatcagtcatttgcttcatcagctgtctactagcaggttcaaagatgagaacgtaggcccatcagttattgctcagacagctgctgatgaaggttcacgaacagggatgaaaggtcccggtatcttgagttcttttacaatgccaaactcaagcaagctcgaaagttttgccccttcaaagtcagttagcttctagtgttttgtgtctctggtctttcgatactcttcgagtcatttcaatacactttgtatttgcagtaccggaaatcggaaagacttggcgtcgagtactaagcaaatgaccatcttctatggcggtcaagctcatgtctttgatgacgttcacccaaacaaggtgattctccctaacacttatacacttgatattcaagttatttgactacattttgatatctaaaaaggtagagaattgagaagttcatctgatgaatgttatttttttgcaggcggatgtgataatggccttggcaggatcaagcggaggctcatggtctacgggtttgtctcataaaccgaagtcgaagaacaacacaagtgacggtccatacaagctaggccaaatgtatgaaggaggcagctctaaggaaacaccacaaatgcccccggaatttcgtgcaaggccgagtcatcaacctacctccagtgcctgtcaccggatctttacacaaccaggtgacttctttttaaagaaaaccagatttcagcagaaattttggttagcttcttacaaatactgagtggagtagagtaatcaggtcttattttgcattgtgacataataaaatgaggatacaacagtaaagagttatcaactgttctgggttttatcaacttgaatctgtttgaggagccataaaaccatgtacatgtatgatttgcaggtagagagcatcaaggaagcatcatctcaaggggacgagatatcagagatccggttcacagatcagatcctgaaaaagaagccacatgattaaagtctgaatatgagagacgatgagtgtggctgttcttctaagttgttgttttttttgttttttttttgtttttggtcaacttcttctaagttgttatttgttgacttgatagctttgtacaatgctctgtacctttctaggtttgtattcaaactcatctcctcaatgatttagagaataatattttctcatagctcatatataaacatattggtcaaccaaacctactatttctaggcctatcgattttcgtatatttccatgtaaggctgagcatatggatacatcacatcacaagagaatcatatctaaatcaactctggctctactctggttagctgtaactcgaaaggagagtcacttcatatcaccttattcaaacccttcttcgagtcagaggtgttcgttcatggcagatatatgacttctcagcctctcattcttagtacattcctcctgccattgagaaatttagcactacgtaagtagatgactctcgggcttttcagtataaacacttatttcctatcttgtgctaacctggtatgctcttagtacagtgtagcattttctttgctctgcagctgcagctatatacttttcttttgaagcatcacggagcctctgctcttcttgaagcccaagttgtatttttccaatcttctgcactttaaacattttgttatgacaaatcatacagctatagataggtaagatgggttagttcatgctttgtgcctcaaatacctgattcaatataactcagattacctgttggattcctttcatgactccttccattgaatcaataagcttcacacggccagcaggagtaccaatcacgtcttgaaactacaatcaagtcaacggaattatggtgaaactttgactcaccaagagatatactaaaaggggaaagcagagacgtaaatcaacttagtaatgaacataagctattctcaacgatataagtacatgacaactaaaggtacaacgtggagaacagtacaaagcagatgatgctagttatagaaaatcaacaaaataataatgcctgtattttacctgtgaacctatggaattc

SEQ ID NO: 660 - DNA, 94482 bp, Arabidopsis thaliana
gaattcaaaaccttaattcctttgttttcagtatggtaaattcataattttcatggctattagtttgctccttattagaacttcttttgcccttctaatccaatgtgtatgtggcagcaggcgccgccccaacatctttattacacagaattggataaatatataggtaatgtacatctacactctacactccacactccacaagttaaaaaaattctcacttaaaacctattttaacacatgtattaaaaatatacgactttcttggacggttatgcatcgcacaaccacaggaaacgatttattaatatacagatggctaatccaggaaataatcttatatgggtacagttataaaaaatcaataaaaagacatcagcaaggtttaaacttgggttaatgtggggcaccattaagtaaaaaaccactaaactaaatacatttttaattacataatgcaaacttatataagatttatagaattgagtatcgggcacatgccccacccaagactaacgtgggtccgcccctgtatacagaaacattatatacaaatattatcatttgaaaattggtttatccgtacagttgcaggccattttaatactttggcgcaaagaaaattttgcatgcgtattgttatacatttttcgaccatttttaaaaataacatatgaaattaagaagtggaagtacatatccagtcccatttttaattaatttcgggacaaaggaaggtatataatttaaagaacataccttataataaatgaaaattcaaatggtagttgaagaaaggacagaatgatgaaaaagttgcatgcgtccttgatttcttgtaacgcagataaaatcccatgtagttatcatcattatcgtcaatcatcattcctgatataaacttagaaatttttcataatatgatcattgttacagtcgtgatatttataatgaaatttttagaaccagatgagacatgcatgcaaaatttatcgacattgtcccctgtgataaggcacactatattcaagcccatgcacgattttcttatattactcattattcacatctctggttccaaattttgaggatatattctgcgtaaggatagatactgtgttaaaaaaagagatagatactgttgatctaataacagttgaaactcaaaatataatatttaacacacaaaaaattaagatcttatatatgctagtagtatttgaaaacaaaaaacaaatagttagcctttataaaaaaaaaaagtaaaaaaaaaaaaacatatatatatatatatcatagctcaaatatgacgattaccttgtcttattttttattttagcgtttgtgggaatgtgatgtagttttgtcgtgattaacaaacaggttttacaaaaacaaaaacaaaaaaacaaaaaactcaaatatactactatcagctgtgtttgaatatattaaaaaaatgtttgttaattttttatgcagagtttgaagatagtttctactattcactatcttataacaaaatgttcaagtacactatgtatttattagttaaagctagaataaatatgcaagaaaagagtgaaaattaataatgtaaaatattgagcgttcctcacttataaatttctccaagtgttttttcttttgtttttatcatataacaaattaaattatcgacttttcactataattaataagtatatttttgatagagacatctattcaagactataatgtgatgatgaggaatataatatctgtgaatctatttcctaccgttttagtaagctgatgaatcttcttcttttctttctttacaaaaaatcttatatgtgattgattacctcaagaactttcatctcttcatgcaatcttagggaatattcaattaaaatatcaagttgaagtctctttcataagtaacattattttgttacgaaacttagcatttaaaataaacaatttttgttcatttatttatggtttgattaattagtttcaaacgctacatactttccatagtatattttaggctgttcactaaaatctagaataaagcacatacttagttgtcactcatcataattctctaatgggtcttttcttttatcttcgatcggcatgtgattatatgtcaacggtgccaaaggaccgttagctttctataaagaacaacgggcgtatgtataatgtatacatgtgtaaatataatttaagcaattatagttaagaatgtattatttaaacaacacctttcttaaagagtatacaaaaaaaaaaatagtggaccctttgataatgaaatgtatgcataagagtataaagcaagcaaagtcgaaagtttccactaatttagtggacgtatgttttctattattattttgctctctttttttttattgtaacgatgacatgaaactataatgacatatttatattaaagaatgatatctaatctctgcattaatattttctacttgttaagtgtatatatgcttctagccctaggcattcgtttcttacagatcaattgagtcttaatgataacactaagtactaattaactacaccagaaaattactatagataattatggcgggagaacgtacggcttttataatcgccaacctaaaatctactttaccatcttctagagaaaacattaacaattttgatgcatttttattagatgtcttttgtccttttatcaaaatacataaataagacctcctaaaatatgaattatctaacttcactcttctttcattataataagttcaagagtacagaaatttccgttttatttaactttggtttaaatatcttattacaaaaaaaaagtgaaaaacgaaaatgttagtagtttataaccgagtagctttatagtatgaaaagataatggagtactacttagaaaataagagaaaacgttttggactgggatgtaaaataaaataaaataaaaattagcaaaggaggagtaatttgaaaaaggtgaaaataagaatgataaacagaaggaatgtaactttttgggtgggggaagattaaaacaaaatttatcgaaacgatgagtaaattgaaaggattaaccccacacagaaagaaaaaaacaaaggaaatcaacttttgtttttttgggtatcattttgttttcaacattaaggcaaagagtcaatgcctcccacctgatttgatttttgtcaggtcaatgctaagtcacctcacaactaccataatactttcacttttcattttaagttctttattttgttttcgtaagaaatttttgattatttaaaaacaaattaaaccatgctattttgatagttgacgaaaacaataaggaaaaatgaacttgataaagacggtaataatggcagaccaggtttggtgggtttgcttctttaacgaatccaaggttaagataaaagggcttttattacccaaagactagttaattgcatgattttaattttctactatttaacctttttatcttgttatattatttttccacatacattagaaaatttattaataacatggtttgcatatatcttttactgttttactaacacaagaagaatgtttcttaaacataacattatttcacattatctacatgtgacatattagatttatataagaaatatatcaaatatacttcaaatttgttacatattccggaattatgtaattgaactaaaaatcataagacacaattagttccgtacgtaccggagagaacgattaattatatttctaaggatgatgaatactgaataggttctaaactttattaatactcttaagtcgtaaaagattggaaaaaaaaaactcaaaataatacgagattgaatacattcctcgtttataataaatagatagataccaaatcccaagaagtaaaaacgaggaatgtatgtaaccattaggaagaacacgagcgcgtgagaacagtacacgtgtctcatattttggcgtgaagaagctggtaaaaaaaaaactggctccagacacattcctttcgacagtcgtgtcgtccgtttgctccgtcaccgtaacggattactaaaaactacagtattcaattctatttccatatgaggtaagttgatgacgattctcatgctattttccactcgttggatcgcgatcataattaagtaaaactttaaatgtttcggttatttaaaatgcttgaaataatcaaataaaatttgatactaataaatatgacttcttcttttttagtttaatgtcattaatcactttgttgtgtccattctatactattatttattttatttattacacctaatcatatttgttatgcactatcgttcaacctttagtatcctatcattagttggattacaaaataggactactataataagttaatttcttaaagtactaaaatgtctagagtccagatagacattgcaaagaaaaaaacatgataattcattttttcatagaatagaaaatagaagccgtgaaaccaaagataagaaaataaaatttaaatagtaacagaaacagaaagttgaaagaaaataaaataaagaggcacgccaatatgccaaaggcgcacaaagaaatagagcggtgctcagcgtgggccgacaattaagtggtgggacctttttttaagctgcgttcgaggctaaacgggccaccacggcccagtactgaatattattattattttaaaattgtatgaattaatttgtgggtgattccgtaattctttgatttctttatcgatttaagaaagtttatggagaatattcggcggccgcacttttatgccaaaccaaatctcatctttaacaaagtactgtagtggtgagatctcgaatattatattttagccgatttagctataaaggcaatatctgtattgcacacttattcaattttcctaaatacacttaataagaagattacacatataatgaataataaaacctttcatttcattgataatgacaaaattttgaacctttcaacttatcattgataaaatgatatgcataaataaaattaaatgttaaattttgttttgttttgttttgtaacttagactttgggctttgctctagaccatacatttttttttttttttgagaattatgagtttgatgcctattgggtttatattttacatgtccagactgagtaaaactcataatactcttgcccccgtataatttgacaaaaaggcccattttatgttttgttttgagagcgagatggttccactttggcatttggttgctcacttcacaacttaattgtttcttgcatatgatggcttaaaactggttgtgaaatattttggttttgatcaggattctattttatttatttataattattgatcagtattctagtaaacacaagtgtgtgattttgaaaatcatcatttgcttattgaagaacaatgttcactaatgaacccaacacacacattgattctagggtgtattacatgatttacatcgtagatattacatctgaaggccgcaagaaaaataaaatgctattacatctgagatattgaagtctttaagatttctagtcgaagatattatgcatatatacttacaaaattattccatgtgagtaagttgaatgcaacactatactcattaggaaccaacaaagttgtgatgttgatgttatgtaccactaaagtgaagtttttcaggaggttctaattcacaataaacatcaaatacgaggtcgatgtggatgctataaaaaagtgttttacgtggacgattaagatcacattgataatgatgagagaaatttaccaaacactgagttctggtatggtgatataaaagatcattttcagctcatgtagaaaacatagctcatggggttgttagcttttttgtaacattaagttttttccaacatcttcctcatttgagattttctttttaataattagaaaatccataacacaattgagataatgcgctcttccgtcccatctcgcaccaaatctcactctacaatatagcatcttttatggatcaaactcgagtttttataatatgttaaatttcatagtttctaactcgattaacctactatgactctgaattattaatctagttttcttgctatatgtatgatctatcagtcgtatcggattcatagtatcgaagttgcaaataagaatcttgtttttttttctttcttttcattttctttggttgtacgtaaaggcgtagactcaaagagtacaagttcaaaattcaagatatagttaattacagaattcaagagcttgaccaaaaagaattgaaaatagttaaatgaattagttataaaataatgaatagtttttgggattcacctccccttgttgttaagcaaatgtctaacttcgttggttataattttagtaaatccatttaagaatacaagaaaaataaaaaagagagtaacacatagtcaaagctcctctgttttagctgtcctctgtctcgttctcatctctcacatgaaccataactttctctaacatcactctcctttacacaaccccaaaaatagacctcacctctctcgtcttctctattctctccgctccttaatttccaattccaaccttctctgttttgccttgatggaaaagatagctccggagctcttcctcgtcgccggtaacccggactctttcgtcgtcgacgacctcctcgacttctctaacgacgacggcgaagttgacgacggcttaaacactcttcccgattcttcaacactctccaccggcactctcaccgacagttccaactcctcctcgcttttcaccgacggcactggcttctccgacctatatattccggtaattttccgttattattttctcaaatccacgccaatatttatgaaatagtaacacttttttcttcttcttcttcttcttatttaatcagaatgacgatatagcagaattagaatggttatcaaattttgtggaagaatcattcgcaggagaagaccaagacaagcttcacttattttccggtttaaaaaaccctcaaaccaccgggtcgaccctgacccacttaattaaacccgaacccgaacttgatcatcaattcatcgacatcgatgaatccaacgtcgccgttcctgccaaggccagaagcaagagatcacgttctgcagcctccacgtgggcttcccgtcttttatccttagccgattccgacgaaaccaatcccaagaagaaacaacgaagagtgaaagaacaagacttcgccggagatatggacgtggattgcggagaaagcggaggaggacgacgttgtttgcactgcgcgacggagaagacgccgcaatggaggacgggacctatgggtccgaagacgctttgtaacgcttgcggagtgaggtacaaatcagggaggctcgtgccggagtatagaccggcgtcgagtccgacgttcgtgatggcgaggcactcgaactctcaccggaaagtgatggagctccggcgacagaaggagatgagagacgagcatttgctgagtcagcttaggtgtgagaatctactgatggatatcagatccaacggtgaagatttcttaatgcataataatactaaccacgtggctcctgattttagacacttaatctagttttctatttccacgtggataatttcgcaataatttgttcgtttcgtttagctttatttttttttttttcctttttaacatttgtttttcattttctgcagactacttctagtactattgatatatttgatagcttttgtttttgctcttcgacttcccgaaattttaattagaaagtttataaaataagagaaatatggtagaaataaaggagttaattaatgatatacatatcaatctatttctggtttttaatactagtcacgaaaataattgaatccaactagaacccaaaataaaaaattccaaatagttgttatttccctttctctactgtttttattttcataaagtgttaagcgtgttatgaatttggttgcaatcgtcgtgtgtgattaagaacaatatattccattcaatttaaaatcaaattcaaataaaaaagtaaaaaacgttcttattcacccaaaacactgggatccggaagcttaataattattcacagatgggttattataatttatcaaacttaattattctctgaattttaacttctttcacgttttacattctgacaatattcgaggaaatctgatgctgtaatattaatctgaaatatatttagtatagtaaagggacaaatacaaatttgcacagcacaaaagtcatatagaaatattatttaatttaaataaagggaaatggagcatagattgaggtgctcgtcacatgcattctcatgcaaacctaaccagcaagtgggcgaatttatgatgtatagtgtagtattatatagctataatatcaaaatggtcctcttcttaaccaacattcaatattttattttgatagagatatataggtaaaggtccacggactgtacttgtaatgtctaatttcttttggtttaagcgatccttattattagatttttctatgcacaaacaattcttatcactccattcaactttacacgttgaaaattcagtaatttaccaaatggtaggctgccttgaattccttttacaaaagcctatgcattccactgtaaatgagatatgtaatactaaaactcgtcgaaatttctctcactgtttgttcttttgtttgttaactaccatccaaacataacttagaaactgataaacattgatgattatttggttttaaacattagataatgttgtttatgttggtttatatcatatccaaaaagaaaagaaaagaatacgtaaaagcacacatatatctaaatattatggagtcatgcgagtatgttgcgtatacagtatgccatgtgatgcatatagatatttatatctaataatgtggaatcataacggtccaacgtagcgagctgaactttggggaagacttcgacgtcactcaaagaaagtatcaaaaagaaatcaattccaaagtcaccctatatgttacataaaaaaaaagaaagaatataaaacttaaaacatgagaaggacgatataagctatataaacacacatatatactatatacaaaacgaaatagacataagtaaaaacactaataagaatcatttctaacaaaagcactgagacatgtacgtactagaaattgaggtagtacgacgggaaaaaggtgtcaccgtcacagtacgtttctagtaatgtccggaagcttttttcaattacgagagagtcagaacaactagtattgttagattctcttaaaaatcattacatatcagtacagggaaaatattagatctttgatcgaaagaaatttgcctattacaaatagagtagaaaataaatgatatgacgatttatttaagcttttttaaagattaatattaacgaccaaaataatatatataccacgattatgatttttattaaccttttattttgtaaaaaaaatacactgttaaaattttaacttattcaagtttttgtggaagtctactattgactgccgagggatcaatatagcccagtgctatcggttagaccgatcaatcttggcactcatgtatatgagaatgtttcctttattagttaaaatattgttattttaactatgaaattctggttgttactttggttttggaagccaataccctatactacagcggtaaaaacttgaaagtgtcagaatgtaatcgaaatttacatgaattcaactccaaaaaaccggtggaagaactactacaagcaaattaaccaacaacaaatctaacatgtaccttgaataatcattacacaacaacattgccttgcctgaattaaccttaatcctggagaaatcaaaatcccagaggaactacgccaagaaaaagctcctgaatcagagtaaagccagcctaccagttatggaatcaaccaactcctttggtcctgcacaagaaaagtaatgaacatgttgaggaacaacatcttagctaaaaccgaatttcaaaaaattattgtctctaccaggtccaactgcaagaactgttcttgatccagccgcaacctgttaaaggaagagttttagtttccagagaaacttgttagcgtactactaccacagaaaattcacaaataattttcattcaagagcagtcttttcgtgtttcaataggtcggatggtgtttatgtcttctatagttctaactatttgattagtagaaacttttagattttcttttgaataggaggagctctgattatactttcagcctcaataattgatcaagcacgacaaacctcagttcttccagcatcagctacaacaaaagtcgggaggccaacgctctcagcagcctctgtgatcttattcctgtgagcagaaaagataaatgtagctttcaaatttattgaagacaacttattaacatttgtagtaaagtaataatatgtcttgaagtgcgttttgtttgtatcccccaagattttcacctgcttacatttcttgctgtttttgcaagtgacgactatctttggctgcccattttcctcccatcgccgcagaaggtatcggtcactgaaagaattaagatgaaaacaaaaaaaaacataaaccccggactgatgcatcatacaaagcaaacaactcatttcagacgaaattacctctgcatcaactctgcatacatgccggtggcagcatctgcgaatattaaaaagaaagtcattttacttccagtgttcaaatttcaaacacatttcataagacacttacgtgcacactgtgacgcaattttgcccgttctcatcttcaagtcttgcctaactaccagtacctgtgatcagaacaagctcaaattagttacacaaatgttctgattttaacttgtaatctaaaaatctgacatcattgaaaactcatcaccatccttgtatagattatgcaagtctcttttatgaagctaaaatttcaatcatttgatgggtttggaacataaatcagcttgcattatcactaggttttgttataaggatttaagttataatattttactccaaaccaataaaatctaggggcagagacaagagactatcgttacactagatgatagacaaaccattttaagctcttggtccttgccattgcctggtacagaactctgcttctggaccttgctggataaaagtctgctccttttcactggggaggtcacttgctgtgataaatccaatatcatacctatgatgaatcctatcacaacccctggtatgagattctctgctctaaaactcacagatatcgacttcttttcttgtctctgatcatattcaccggaaaaaaaaaaacaatgatacatttttaactgtccaacaagaatgctggtttagtaagctacaagaaaatttcagaacatgaccgaaacaaccgagtaaataagctcgtttgttgcagtctcagtaagattttagagacaaaaacatgataaattctcgtttgggtggtgagaactgagaggcaaacattcaaatttacaccacaaatctctcaattttatttgccaaatcaaccatagacatacatataagaaacttgtgcactataaagccaaacacttacacttaaagcaaagtacactattaagaaagaatcagactttgactctttgagcttaactgatcttacatcaataaccaaaagaagaaagagctcagaatttgtaatttgtttagtttcaagttttccaattcactagccaactgatgccattcggaagttttgatcaaactagactcaattcctcagcccgagataaattttgacaaaaaagaagcaacaaaactaagaacaaattatcaacagaaaagacggaaaataagtcgaaatcaataccatagcttgaggctgcgaagagtttcgagacgaaggccacatgatacgcttctggagattctccaaggcgacagaggaacaaagctaagcctttaaaatcgaatgcccatgagtatgatgaagaagggagataagagcagccttagtaaccgtaaacgtcagggtgttcatatctctgattacaaaacgacgcgttgtttggggcttaatgtacattctggaaaaatacatggtccaattagaaaagttttaacagtatatagctactaatgtaattactatagaatatctctcgaacacacggtgcgttttactgtcgtcgctcctttttgttggtctgtttccacttcagttcttctccctccggaaaagctacaaccccaatctaaaaccctaacggccatttctaccatcggagctccgaaaatgccgggtatgtcttcggaatctggcggtggagaattggttctgttttcgaccaaggaaaaaactccggtgttgtatcctctaagctatggcctcaagtctccggttcacaggctctccatctcctggggttgcggaaacaacctacgcgtcacggttttaaggaatccagagttacgcgatgatgacgacggagaagttggtggtaaggtcgtaaacgttaggcttagcggcgaggatggcgaaatcagtgacccacagtggcgaaggatcgcttatggatcggtatctccgttcgcgcttttgcagagcagaagaaactcaatttccagtttgtctaagatggatatgagttcctctctgtatcagactgcgtggtgagtatcttctttgtaaattcccagattttgcccattcaatactgaaatactgttttggattatcttatgattagacttctaaagcgtgtttgagcaattctggattgtcgtaattttaatcaggtgggagtacgtaatggaatacagcagagatattaaatctctccttagtaatacaatatctttgcccgctcctttgattgaagacccgagatcagttataaaggtacgttggtctttctggttctacaattggttaactttacttgtaaatttaactcctccgcgagtgaggtataggtttgagtgtggagctttgttaatggatgttcctgttaacatacatatgcagaatgctgaggaaccaacttctttaaaggctgcgtgggagttgatggaattattttatgcagataagacatgtctgtcttggttgccagaacggctcgttgattggttatctgtaattagtttttaccttcgacacttgagctatcttatttttttaaacttctagtgttttcttacctaccatttataacatggcaggaatacgatatactcctttctagctcacatccaacaatctactcaaagctccaggatttccaaaaggaacttgttggcctgcaggtttgctcatctctaagaagtcgatagttctcagaaaataagtgattgaagaacctgactttcttaacggggttatgtgccattgcaggccatcgaggatgatccaagatactgggaagtgatggcttctgctttatcagttggttggctagaaatagtggttagtactttttttttgggattgggggttctttgtaatttgatcttgaatgttacaatttgagaaatgttctgcccatactttttattttcaggtgaagttgttacacctacatggttcttatcaactagaccagctgggacatcgtgaggttagaatgaagttgttcatgtttaggtcctttgggatttatgtcatatgaagtgactagctacgtgctagtacttttgtatatgcacagatttctgattattcataatgtaatacaaatttaatgaaatagacagaaaatggtttggtagaagcggttgctgttctcatttcaaaaatgccacgaatgcggccacaactagaagatgggaaatttggtgaatgctctgcagcaaagcctgactttatgaaggtattttagaaacatgtatcattctaactctttttattgtatctgattatgtgtctagactcatcttgccgtttttgccagacacgagaaagatggcagtctcagataactaaactagagtgcagtgccttctgggttcaatgtgctcaccatcagacccgtgagggcttgagaaatatgttgaagatcatgataggaaatgctgattgcctcagagctgcgacatgtaactggatggagctttttgtttcacatcttctttatctcaggccatttacgaaggtggattgctttacctgctgtttgtctatttaaattcgagtcttgctatcattctaatattaaacttgaaaatcaaattaataccattttgcattgcagggattagatggcatgcatagcctagcccagaagtgtgttcagtcaaagccagttaacacttcccataagcttctaagactgcttattggaattcttggagaaaatactgaggtcagtagtacatcttatacctagtcagaggtgcaactgtttcagctcttcgccactttctaatccagcatggtgtaattaaatgatgcaggttgttctggcagagtgttccaaagaatttggctcctggtaggcaggcgatgtttgtttctggttactaagtttattgagtacgctatactcttatctatatgaatcaggacgagacttttcatgtttttgttaggatggttgcacatgccatggaattattgacagctggaagcgaagaaggagaagttcttgtacatgaggaacagcgtaagttgggtggaattaacatggaagagctccatagacttgtttatgctcaagttctttcttctcatgctttgacttggcaggtacctttcttttatgacttatcaagtaccttccctgtaatcaaatcggcacctttcttattgcgcttcttgttatatcaaactcttccatattgtgtttgaaatttgcagatagctcctatttatctagcatcgtgcgagaaacagggattaggcttattagagctgttgttctacaggcagcctgttcaagagaatcagatgcttattaaggtttcattatttcagttgcatttgtacatcaattctagttctggtttgtcgtttacaattctaggatcttgtcagaagccttcacctggtacttatgtttctcctgttgcagagcctagagatttgccgtctctatgaactcagtaatgtcagtgctaaactaatgaaggtattgatatattgaggcactattttacgcttgtattctctaatctccaaattgggcggaaaaaggaaaaacagatttaatctgaagttatggttttcagatttctggagtgcatcattggaaacatgggaggaaaggctcagggattttctggctccagcaagctcgggacgaaaattgtctcagcgtgattgctcaacagctgtttgattctgttggaaaatcattgtctgatgaaagtctcaaggtatatattctctaagacatactcaaagcaaatttcagtatataatttcactgtgggttcttctatctgtgccctagatgacgttgtttcatttcatacatgcagcaatgggaaggcctagtcgagttgctgggttcggaatcacagatctctggtggtctcgattttcttcacaagtaatttgtcatctcttactctctatgaaaatgacttgtttttgtaaaaatctaccctacattattaattgattattgatgccatacattccaggtatagagatttcaagagatcgctgaaggtagtccatgatggaaaaactatagatgcagctcatgaagccgtagagagacttgtatcggtgtgtagtacatctttcttacacatttttctccactgaatattgtgaattaatgctatttgaattactgcagctaatgaagagcccttctactcctcaacgcttctggcttcctcttctgcatgattcagtagataaccaaatcttgttttctttccttttattttccaactacgagaatgcaccactaaaagagtatttgtttgtgcagttgaagctgttgaattggcccgaacgttcgctgttgaatgtaacacagaccaacctgatgttgaacaaattacaagagctatcaatagcaaggttaagaccaggcttcatagaatctgagttgtctgctcaagctgtgggttcagtgagacttgctctagcaacaaatctcggacgtgcttttctcgaagaatgttagcgcgggttgaggctaataaatccatagctcgatatctatttgtgtgtatgggtttcgtactacatttagtctgtatttttccatatcaaaatagactgatagcactccagtttccatctttcactagtttgtaagctgattgcaaaagtaaagcagaaaagagaggtgttctgactgaaaactgaaaaacaaaattcgattattgtaagtggaccggttaaaaccggtttagttagtccttggagaaaacgacacaggctgtgtcgttttagaaatgtttgttatgaagctggtcaattctatctattcattcacaggagtcgagagagaaattagccatggcgaccagagctttgctcgccgttatatatgcgtctccgaatcgctgctacatctctccgagcaggatcaaaatccaatctttaacttgttcttcttcaagtcattattaccaaagacagagtagaaaaaaccacagaatagctcgaagttactcgtctgactcggattcctccgttcttcagccgccggatgtggcccgtcttgctcagacagctcgaatctctctaactccggcggaggtactcgctttttctcttttatcgaatctactttgtccagttgagttccgcttcttcgtccattgatccttttcttttttagatagaggaatgtgaaactaaaattcgtcgagtcatcgactggtaactaatctacctctttctgcacgaaattggcttccatgtttatgtcattgaaccaaaagagaaagaatcaatgtgttgttggattgctgagaaatgcaggtttgggcagcttcaacaagttgatgttaacagtgtggagccagctattagagcaggttagaatcataaacttttatcaattattactcaacgttcttcttttatttggtctactgtatttttgatcttataaattggtttctgaaatcattggtaaaactagtttgtaagtaagatttgtttgttctgtttcaagtagagagactcatgtcatgtgatacagattggagactgtataagtctttctagtgtctagtctaagcacattctctgactaggcaatatggttttatactagtaagaggtctaattatcaatcttgatccgttttggaaatcatgcttatttcaatatcttgatgcctttataaatctcaaaaaacttgtagaaatggatggtggaaatttgcgagaggatgctccagaaacatttgacaacaggtttgatctttacacaattttcttcatctgcaatgataccggctttaagatgaaagccatctattaaacttaagagttttgatattcctctaacagggacagtataagagcttccattccaagctttgaggacgcatatctaaaagtccctaaaatactaaacaaagagtgactttttcaggtactcttcttatccatagatgagcaatcatagtttcctgattatgatctaagacctgcccattgatttttttttttttgggtgtatgtgtctttcatgtgcagcttcttggaattgtttggctgaagagattcattctcagatccggttcttgttccagcatctctatgttttctaaaattggttagcagaaaacaaaattgcctcaaaattgttaagtctcacgtaggctattattctacaacattttgttcacaactcaccacaaccttgtgtgcatatgaaactaaactcaaaccaattttgaatagtgtctgtgatgggccgttttgatcccagcctattttgaatcctttgcgtttttttaagctcgatccgttatgaactcggactgacctattgctctacaccattcaaattcatatcattagtaattccaaatgtctttcttttgtattatgttgccccccgaatagttttttaagtatttgttgaacaccgaaccaataagattgaattataaatgggccctaagcccaaagtccaagcacacttaaaagtcagcgaaacgcagatagtaattaattccagatctgtgaaaaatattaccactggcaatgagagcgcgtgctaataactcgctaaatttatttcaatttccgtggtctatatagtcagccaaatcatctaattttccaaatatgcaaaaaatcagcgcgtgaggagaatttcactgttacaaacagtttgcgtcttttctctattaccccattgtttcaatttttgttttttctttcacaaaattaaagtaatgccagagtgatactacgggaaattgcagcattttctgagtttcctaactgatcaaaaaaaaaaaaaaaaaaacttacatttgagagagaagaagagaaagcttgtagaaatggaaggccttatttgagaaagaagtgaataaaattgactcaagattgtaaagtctcacataggcataggctattattctctacaacattataattcagtaccacaaccttgcatatagggtggttgtgataggtcaggccgttttgagcttggaccaaactattgctctgcaacatccgagttcatacttatctcaaaccatgaggttagttagtataatgtggactaatgtatgttggaagaagggagacaacaagagtgcaccaacacaatcaccaaaccagtagaagagagtattcgtagtgaagaagacatacaacatttaaaaccgcaaaataaacatcaaactccggatcatctgagaggtccatcaatgttaccaaaaagaaaacaagatggatcttggcctgggaatcaaaatataagcgtgtgctttccggattattctttccttttcctactttcctaagagttagctatattcacctgaaaaatctttgaatcagcttgtgcacaaaccagaagacgcctttcaaataaaaacgagctccctccaccttgctttgtattaattatagtttggttcgtgtctcacgactgccagaacagctcggaatcatcgctgtacaaggagtaatcttgtatctcgaggtttgcaacgtgccagtttacgagttgggattgcaagactttgcatagaaacaaagcgactgggaatatccaccattcgttctcgtccctgcaaaagaaatataaataagttttgatgatgcaagaaggaatctgtagtttggtttgagctcagagtgaagtttgttttcttctctcacatgctaatgttccatggctggagatacgggatctttttcccagatgatgagccatgatagtgaacatatccacacacaaatgccacaacctgcaaaaacccaccatgcacaaaggatctttaatcaagtaagaggaagttgcagaaactatagaagtcgaattttcagatgtagcttttgcataaagagagaaatacttacgacattgaccaaggatgtgacattccacaatgcataaacgcgtgtgcgactagcagagcgccttggtccgtggctaaacaaagcgctgaccccagcagggaatggaaaaatgatgctgagaggtaaaataaacatagcgagaaagacttccagcaatgatatcgagtagagttggagtagtgtgagtaacgttagagttaaatctcctaggagtagcaccgagataaccaaaccgaccagatcctgttaacaccgcggaaaattacagatttcaaaaccctcaatagtaaaggaaaattacagatttcaaagtctcagggagactttacctgatgaccaacaggttttgtgttatgaatcaagaaggagatgagggaaaggacatctttttcttctttaagaaattgtaagcttccaatgtctatgatttctccacactcttgatgcctcacgtggttgatttcgcttcttagaggttgaaaattctccctgaaatcaccagagtgattttcaatttgtgtccccctgcatattcaaaactcaatgaacgtctggatgctgcatattcaaataaacaacagagagaatcaaagtgacatttcttaccatggatgctgctgttctgtttcatcatcacttcttgttgatgcgacttcatctgcaatggtgtgaacaaggattccatactggcaagacgacgaagacaatgcctgaaacctagctaggtcaacacgtacaccatgtcttttcaaagcagggtttccatgagtttcaatccatctcataacagagcgaaacgtggacctcagtttcccttgctgaaccagacgtagctgagcgttcagaccagcgacaaagcggtaccaagtggttggtgggaccaactataaaaggggataaattcattacgttcttgcagtcataggcaataaactatacatgtgaagcagtaaaataccacgcctcattaatcagtctatatgaaacaaaaaacagacctggctcagaagactggtcagaatatcgtcactttggagtgagtaataggccatgtaacttccgtcgcctccaaatattaaaggcattggaagtctttgatgaacctgaggaggaagatcgcttctcttttcatcgccaccaaggaagaaatctagatgagctaacatcaaatcaggagtagcagctacctgcacagcacaaattctcatgattcatatactacaatcctttttcttgccatctgtaaacaatgaaatggagccttgttttcaagaacacaagcaccaacgtcttgactaagatcctattagaactatgatgactgctccaccaattctcacaaactatgattggccttttgtctttcttgctaaatatttacaatgttctaaaggtagtcagttgagagcataactcaatagatgaatatgtacctttagcccttcatataatgcccttgaacgacacgagcgtagacaagaatggtcatattctgatctaacaaagtcacggagtttctgaaatttcagcctccggcgtgattgctgccatgaccatgcaagaggatagactagaactgaaagcataatgtaaatcgcaccctcccaccactgatatgcagctataacattgacttcatcaacaaacccattaaacgcagcctcgtacctagagaaaattcaggagaggcctaagtatttcaaaaactacgttcagaacattttatcaccaaaacaatcaacagctaataacttacacaatctcttttatttcctctgggggtgtatgagaaagatgccaaggttcactgaaagtattaggacctaagaaatagatcctatgcatgtggccctgtgactcctccactctgctcgtctccatcacctgatacgattaaacacaaaattaatattacaacaaagacatcaactataaaaggagcaccttaacaattgtttataatctactgaaacaagagcgcaaacacaggataataattatgcatcgcaatctatttcaaaatttctccttctttcttgtgagttccgacgagatatttcagatgtatctgttattaggacgaccatctaatagcaacaacaaaaaaatctggcgctattgttatgtttccattcacatgttatcttatctcccttcaaaaactttcatccagactccgataaaagataaagactaagcaaacctcattcaacgactcgaggaatggaaatgagtgatcaatctgagagccatgctgggtcggggcagacccatgcaattcgtcaccgctcacaaatttcattctggcgacgctgaaaacaagtgctagtaggaggagcacaactactaaaagaacaccaaacagccagggtccaccaaatgtgtatattaactcttcaagcgtagtataacagtgtggcatgtggtatctatccgaaatgcatttatatggacaaggcgtttctgcaacaccacctgtcaagaaacaagtaaaacataacaataattgtgtatcagacacactaaggataatataaacaaagacaggggaacacattacagcaaaaaatcattatccctcaatcagtgttccaaataattacctcgaacagtgacatatacagcacgatggggaatatcattagccggacaaagatgacaaagagctttatcagatccagtaacgttcttataagtgccagatggacattcctgtagaatatttaaatatgtagatagttgaagcatgttttcgtttttaaaaattttggtcgacaattaaagcgtgttaaaccaatgaagttggagagccattgctcgcaagaaggatgaactacattaatgtaatagatattgaagtatcaatctatcaacaaataatcaaaaaggacactaaatacctctggcctaagcaggtctgacattatgtggttaatatacttgctattgtttggttaaagaaagagattgtaacatcacctgagaccatttgaataaaacctagtagagagaggaaaactagaaccctaatccatccaaacatgttttaatgcagagaaacaataacacataaagaagtttatcagtacctcgcaaaataaaccatagagcccttctggacaagctttgccagtcaaagttccattccctccaatattatcttcaatgatacccatccctcctctgtaaatcattattgaaatcacagattatattctagaaacacattaagaaaagaatctagagtgcttatataactaagaaagaattgtgtttctccaaaatagaaatcgcaaatatgttatcataatataatataaaaggtcgttaagtatgaacttcttataacaaaccttacataaactcttcccttaactatggcaacgggatgatagacatcaccagtgggaatgtctgaccaatgaaaatgaatccttccaccacttcctcctccacctcccttcaggctaccatttcctccaatactagagagaatcgcagacctccctatctcaagtgtgcgcaagaataaaagtacggttccacctgaaccaccaccaggtcctagacttgaattacttaggcctttcagcgtcttcctgggactttcgccatcagttgttattgagccttccagtgacaagcttgaaagtgggtgctcaagtgaaccaagcacttcacaaattggtagaaaacaaattattaggaagagttatatttgagagacagtcagtatgttgcaggaaacaggtcaaagtgaactaatcactacacaagtttgtagaaaaaaatattattctaaagagataaatttcagaaacagttggtatattggtaggaaacaggtcgaagttaaaccagtcacttctgtacagagatagtgaaaagatgctgaaaccagattagaaatagtaagctttacatgaggtcaataaattacttcagttttctctttttagagttcaaaattaatcatgttagaacgaggattaagttgatactatctgaaatttaaaacttaccaatgattcctcccccagcaactgaatccgttgactcttcatttccacttccgctgccaagttcacatggtaggtctgcatttccataagactcgccaccctcaatgcaagtatgattgtaacatccgcttccgcctttaccaccatgtccaccaccactcccaataccgcttctcagaaacctacctgtcccaactccacctttgcagcctgtgtgcatatttaaatctctcaaaactggttcacattacatgtatgaaggacaaaaagtgaacacaaatcaggagaatcatcttaaaagagtatgtggcttacccatcccgtccgcggatattgttccagaagagcggacaagtaccgttcttgccagatggaattggattacagatcctttaatgagaccttcaacagtaatatcctcaactcggcagatctgcaacagagaccagttagaacatgtaaaaaccttcttcgtaatgttttgtttccgcaaacaagcacctgaagagtgaatggaagggatgaattgacattgcaatcctccggtgggtggagtagttcaacagggcaatcttggcgttgacagtaaagctttggagtactttgaaataaaccaaccataaagattttagaggttcaatacaacaaaacaaaataataaaaggaaaaatacttttgtggaaggatcgctcgaaccttcagaacttacaggccaccagttgatgcattctgcaaaggaccacgcaaaaccgctccggctccaaccttcccgaatcaaagaaataactgttagccaagaatactttttatcttcctactggttctcacctatgtctgaactcacatatactgatatagaaaagagctacattttttccttcttaaagatagtgaggaaatcaaaatagttaatccgacataaatgataattttagccctgaaccgattcacacaaagtagaaccacaactttcagaacctacacatctcagcccacagaaggtaaaaaaaagtcccaaaagcatgatatagtttcttttccttacctggatgctataaaatagagacaaaatcagacgctgtgcttcaattgtatctcctgtgcctgttagattcaacaggccctgcccatgtactccgaggtttccattggattgtatcacagatgactcctaaataaaagtaaagagcatagaattgtacttcaaagttgtctataattccacagcacgacgaagaacaagttacagtatattgattaggataccttgagcaccaacagattactaatttcaagcattgaagttcccaatattgtcacaccaccgccatctataaacattcttgacttcaacatcaagaacaccttgactgtcatacgtaaagccccgtaaacctgatacatagcacagaggttaacatagtatgcagaaggaagaaaaaatataccttttcaaaattaatcgaataccttgattgcagaattactcatcaagagttcctcagcaaataattcaaattcagaggaagcataacgtggaagaccaaagttcaactctccaccatttgacaaacttatcaatccttgaacctacacaaccgggaaaatgaataacttgttcacactgattacacttggcttcagtggccaaaagatgatgcttacagtatcaagaacctatatttactttcacaaacctgaacacggctccaacgcaagggaacagcaacctttgccatattccggatatacaaattagtgaaaaggcggtggttagggaactccaggagaagagtgtctgtatatgttgtcttattgtggttgtcaatggttaagctctctgaaataacatcatacagagtcccagcagctccagcattttctggacaaccaaaactacgacctcctacaaagagtaaattcgaattgaactgtcacaaccacaaatacttaaacaaaaaagggaactatcaagatgagttgttatcatcacaatatctaatcaattgaaagcacaaatttagggaatgattgaaagaacaaactggagctaaccattgaaaaagatttttggatcagaatggcggctgtatatatcgacggatacccgtccaccacctccaccagcatacccatcacctccagatgcacttaaacgaccatttcctgccctgtagcattaaccaacacagtagtttcagatatctaatattgaaccaaagttcaaacccatttttgtgtcttggtaaagcaaattgtacttcaaaaaggcaagatgctaaatgcaataattaaggatatcattcatgggccacaactcaaaggaattacaaaacttaatttcctagacaacctaagacctttccattattaattgaccaacaaccatcatcaaatatggaacaagaagagaagagtcaacacttattttatttccaaacttcagaacaccaatgcaaagccttaagatataccaaaactcactcacataaaagaaggcaaccattagatgatttaattaaagagaagaaaagaaagagtgaaaatgacaaaaagagaaagaaaaaaatatttcgttacattttatgagccattacgaagatgctgccgccggacccaccaccacctttaacaccaccactggccccatcagctaaaacgctgccgtttaaactaatataccctaatatctctatcgccaccgttccgccgccacctccaccgtaatcaacctcattactcgtcgaaccacctctactgccataaatctccggcttctccaaagacgaccaaccataaacatcaccaccgaacacatcttccggaatcttcgtagtagtatccgacaaacaacatgcacctcttccaccgtatccaccaccggcaccttccactccctccggcgtaccgctagtatccggcggaggttctccagccaatccagtggtatcaacggccgagcttagcccaaattcagcgttttccgccgcgagacggaaagtcccggcgataaccgaagaattctcagccaatgagaaattgccggagatattgacactaatcgaacatcccggaaactggcaaaccaatctaacaccaggcaaaacgtggagattacctttaccggtgatgtttaggtcacgtgtgagattcaaatcagcgacgagcttacacgtggaatctaaagagccaacacctcctaggtcatctacacatgaaaccgacgaatcatcatcatccggggaaggctccggcgccggagaaggtgacagtggttcgaatctaatcgcagtctcatcccacgaattgattaatttcggatttgcagatacgaggatgacgaacgcgaaacagagacagaatctcaccattggaatcgaaatcgaaatcatctagagatgagaatccatggttacacaaaacaacgaagacattggattcgaagaacaaagaggctaaacaacaatataaccgttgcgtctgtacgagaattcaaaattagaagaaaaaaaacagattgaagaaacagagattacacgaagaaacagaacagagctttgaaaacagagctctgtgtgtaaaaagacagagagaagagaaaaaaaaagataagtttggtcttgtagagagagagagatgagcaaagaagaggttgaaggaaggaagcgagaggcgcgctttagtttggtaaatgctgaagaaatttttttagaaaggctttcgcgttacacgtgagactttttttttttgtctaccaattagtttttgacacgtgctagtttaataccaccaaactgatatttatttaggctttgtttttagtctttaaactttactttaattgttgtgattaagagatcttctctttaattttgttgaaaccttcacttgaacgaaaaacaaaaggggaaatgctaataaaatatcttctatccaatttttaccaaatgaatctctatttttgtaagaactgtcatcacaactctttctttaattaaaaattagctatattttaattaactcattttgacaaattaatttagggattcaaaaaggatatttagggttttggaactagaggaagagatcaggttttggaaatgtaggacttatcttatgaaattctattttattatgatttttttttttagttcaatcttggttaacatgtttcaattctaaattggtttttgtttatgagtttaagtttttggtaatttacagagacattaacttttgtttttatagttacttatcatctagattgtcttttatggattttttttttttgtcctttccttatcaattttgttttctttagaggtcctaagtggtctcttagagaaggatggtttgatcttgatgtatctggccattttccataaatccatattcacttaacggtttcgatatatttttatagcatctcctcaacttcattgtggtgaaactaatttgagattaatcttctcgacatgtgattttttgctaacgtgagcatctctccaatatgtgagacagatccaaaacagaagagtttttcattattatttttctgttaaagatgagtttatcaagaatacttatacgagcttcacgtccccaattaactcaatcgcgattttgaagatcctaaacctttgtcccacattcagtttccaatcatcacatctcccaaatgtaaacctctcacggactttaagagtttctccaatatttccaacgttcgagctcgttttcgtgttgcccacattatgattgcaaaacgacatgcaactttcagtagtttcgtttttaagttcacccaaaatcatgcaggattacattatcagttatcacagtaaaacaatgttaacgttggaatgtaattgtatgttttgtaacttcatatatgtatcaaaataaatcttgcaaaatttggaaatctgatatatataccactaaaaccttcacgagacaacgaaaattcttcactttaatttgttaaacaaaaatatttaaaagtatccacatgctgttgaccgtaaaaaatactgggcgacagtttcacttaaattcatattcacaactcacaagtcaaagattttgattggagtcacgtatcatatacttcgtaggagttatttatcttttaagttatatgcgaacataagacgaagaaaaaaaactattttagtacatataaatatcaaagtaatcacatgaagttttttgcgaaagtgatagtttaacggctaatcatacaggggccaaagagtactcaattttatgattatttattgagttctgactattttatgtgttggagaatgaagacagtacttgtcacgtttaatgataaaatactgattacaaaacaaaaaaggataatggcgacaataatgcagaagaaatgacggaattcaaaagaaataaattggggattgattggggatgaagctacgtagatgtacgtgtggctttctctcagtgtcgcgaaaccgacatgaagccaaatggcaagacactagattgacttttgtacaacgtgtttggctgttgatgaggattcctctaatccagaggttgcgtgttggtgcgttcccactacacccacacgagcttttacattttttctttatgttctttttttggttttgtgccattttgtgtcaacaatagcgaacaaagcgtagcattggagaaacctttttctataaataatagttttctttaacatgtgttttcttctatcgttaaagaagttgatctttttccgttggtttttgcatttttttgcctatcttggtagttggacttaagagcaaatattggttaatcatggtttgaattcttgattgtgacttactaggcttgtagtttgctaatggtgttttttttaaaaaaaaatgttgagtctagtgctatgattttgctttgagaaattaagtttaaatcctaaggtgttttattttaaccactcaaaatccttaagattattaaaaaacctaagaaatatcaaatgataccaaatagaaaacttacaggacataaaacaactagatgtaaataacttgggctcaattgctttcaaattgggctttttcatatgtgtgcttttggactaaaagactcataggtcaaaaaaattaaacgggctgagaccaaatatttggtttataacgaaatatgagttttttggggggccattctgataaataataagaagaagaagaatcgcgtctgcaaagctttagtgcttcatagagcaaaggagaaaaaaaatggtgaactatgtgctcaaaatcaccgctgatctcgagaatctcactaatctccagccttccggtggctgcgacgattccaacttcccttacctcttcaaggttacccgttaccctcccttttcgcaccagttttatgctttggttcctctcttttgatttccttggtttcgttttagctgggtacgattgattggattccttagctaggctcatgttgagaaataagtgacttccatggatctgaggctcattaaagcttcttagggtcttcatttcgccttgcgaattagaattctatggaattgagtctgacagaatggtattattaagtgactatctagggttgtgagaaacaaaaactcttagggcttatgtttctgcaagtgttcaagatcaaatgtattactgctcctgcttattcttgcttgttgtgtatgcgattaaaagtcgtttagtattctcccttcacatatatcagtacgaaatattaacagaaatgttttttcttgctattagttgaaatgtgaaagatgtggagaggtgactccgaaagaaacatgtgtgactttgaatgagacttttactcctccgggaggtaggggtacttgtcatcttgttcagaaggtaatttgttcatccttactctttaatattgtatgtttgagaacactccttgtgcttttgggttgagttcagaaaagatgttaatgtcaaaattccagaaagcaaatattggctctgatttggtagcaaaatttcatagtttgccaaggagtagagctgtgtcgtagcatttgcatattgagttctatcttcattctccattcttagcatattgaatctcatgatctttggcattaattttgatggtttgtctccatgagttcttctagtgtaagttctgtggaagggaagggaatgtgactatgattccgggcaaaggtcgacctttaactctggaagattctgaggctggagaacatgcccctcttatggtgtttgactgtcgtggctatgaacccattgatttcggatttggtggatattggaaagctcaagctgtaagttttaacagttgcacttagcttttctggttaactcatagcttcgtttccactactatttgatgctcaatactactttaagctgtcgtgaattgagttcttttgaccttaacaggaatctggaaccaaatttgatgagattgatttgtcgagcggggaggaattcacagagtacgatgagaagggagaatgcccagtaatgatatcgaatttccgtgcaagcttcagcgtcaccaagtgaagttggtctctgttgtctattttctgattccctacacacttggtgtatgtaaaaaccatggggattatcatttctcaagttctaataaaattctctttttactattttcttctgctgtttctgctacaaaaagtaaaccatccatgagattgacaactcccaagtttacatcataatatacaaaccttctatacattcaactttagttctacaagcttctgtacatggcaaatacataatttgaaattacacactgacgacggaaatgatactgagatatacagagagaatactgatttaatcataacaaatcgaaataggaatatttggggattggtggtataaacaaatgcgaagacggtttagggtttctatgcactgaatccacggttaagcgagctccaaggaccagttggcagtgtggtacaagcctgtgaagctgcctcctccatttgctccatttgaatccctgcattgcagatgtttgcaaaagacctcatgtgcttgataccgtactgagacagcgatccacagtgcctctcgaaagctctcacctgaacatacaatgaaggttatgcagttcttctctatatgaaacatcagtcaatgagttcataatctgaaacgtcctaaaaggataagagtaaatagagtcctgcgtcacaatcagccccctgcgtcctaataatagagtgctgggctccacaatctatctgagatttttttccatcttccattacgatgattgatgttatcccatgaggacatgactataccaatacgtttttcaatactaaccacaagggctgatgataagattgacacaacaaagtcttaaggggcaagtggcctatttatttacctgatttttaaggcagttccagtcatcgactagaggttgcccagcagaccgtactttgtttagcacttcaggacctctcgaaatgccaaacaagatttttccgacgagtatcacgctattgtcaatatgaagtctgtgagacatggcttcaagtacttgcttctgagcttctgtttttcttgctgaaccttctggtgcttttcggtacttcatgaaaacaataacatgcaaacgaaattgtatttagcaatccaagaagctattaagtatccaaaagatgcaaacaagaaaggaaaataaccttttcccaaaaatgaacaagatctgcatcacgctggtttgtaactcttgaaggtggctttagtgaattcgcatccgcaaaggtaaaattgtcattggcagggtttgttcccatataaagatcgagattatccttgctaattcctacatcgccatattgcatgacatgagaaccataagagtacccaacaggtgcagtcctccttttcacctgaaaacacaaagacacactttatgatgcacatctttgctaacaatctaatttacagttgaaaaagttttagctccatcattacaggcaaaccacaaaaactagaaacttacaagttcatattgctggtgcagagtctcagtctgtaaattgtgcataccactgttgcattttaaacaaatcagaatcaatataagggacatccatagagattcataaacatgagaaacagaacactgcaactcttattggcgtatctggattctttagcttacctatcttccatccaagcaacactgtacaagtcacctaaacaagtttcatactccggtggaggactgggttcctctccagggcaataggtaccccaactgctttcttcggcgtttgatgcagttgtggcatagatgttcaaaccctcaggaagaagcccttcaaagatacttccagattcgcaagcttcgagataaaacacctgcaggtttgccttttagtattactcataggcagcaccaacaacaaaagtatttcagaggaaccttcacgatttataccaagcttttatatgttcctaaagcatgtttcttcttcaagacatcattgagatcatttgcatataggtaaggagaagttggcatccctgcaaataaaagacagaatcatcaaaaaatgttggtccaaaaccattcaatttctgtgtgtataacggaactcaccaagaactccaggaccaccatggtcactgtagaatatgaagatatgatcattaggaccactatccacaaccttcccacttccccctttaacagcagttttgtctccaaggatcacagcaaatagattatcaacattgacatcatctccagtataatcctgccatacgaagaataatcccaaccaaatgagtaaacacatattgagagaatcaatcaaaaacgtaagaaagcaaaagaccttgggaactccttgatagacatcttttccatgagggctgttgataatggttccaggccttggattctcgtaattgttagcaatatcatcatacatgaataccacaatattctcctctttcaatccacctttcctcagaagttgataggcatggcatatatcagcctaaaaagttaacaaactcattagtatctaatacaaaaactctactactatccttagttcatcagatgccaaacgtatctaaactctacatgaaaaattcaaaatatgagtagattcagctgatcctatcaaactacaccgcaactttagtatatagaatcacaccaaaacaccacatagcagcaatcggaggcaaattcaaaatttccgattagagaaaaagagtcaaataaacagagactagtcgtaacagtacctgatgcctgtaattccaatatccgctagatccggcgactagaacagcccacctagtaccggagttagaatcgtcgtcgttttcagcaggacggaagaagcgagaagcctgcgaagggagtttgataacatcatcaggaccgcttctcgcggcggagacggcaaccagcgagactaagagaacaaagaggacgacgccgacggagacacgtgtcatcgttgtggccattagccggcgagtgatgatgataggaatctttttaatcgccgggctatcaaataaaattgaatctttttatctgattggagagaacagacacgttgtttatataatgaacacgcaaaagctagaattggatatttacttgtttagttttataaatggatatatttgcacatttagacatttctttggaaatttggacaaaagaaaccgaaaaggacatattttgaaaattcagttgcgtgatgttgcttccttcttaaacattggttcgtgagttatggagtattataaaggaatttgtcaaaaaaatggacacattattgaattctttcatttgtttcacaaatcccatgagtaaaaaagacgagtctttgaaaagaaaaaaaagaaagaacatgagagaatcatgccaaaggagaaaaataagcactatttcttgtgatcatgtcaagtgtgtttaagtttgaactttgaacaataaaaagatgatttagttttgaaactaaattaatctataatgaagtttttggattgactatttctgtttggtttagatgggatcaatttgttttcggactaaattcactactaaaaataaaaaatataggagcctaatttattccaaattttagataaatccgaaaactgaatatactctcttagtcagagatggaatgccaaaatttgtgggggcaacaatatagaatctttttctttcactctatagcaaacttacaaaaataattatttgttttggatatttcggcaaatatctatttttgtttctttttctgcctcttgttttcttccaccatcttaactctgataagcaatcaaactcaaatagatgcgtcattaaataatttggttataaactattgatcaaaattatatcttttaacaacaacaaaaaaacatattgatcaaaatcgatattatttcgttatatgttactattgtttaacaaaaaaaaaatgttattatcaaatttctatagcaattacataatcaatttgaactagtccaaaccagtccacacgacgtgtgtccaaaatgtcataattcattgttgcttttattcaacgacacacaccattcctaattataatctattgttcttctttttctttttttttctttctaaataatcacacgacttaagaattaagatacaacggtatatatagattatatatatacagtcacaatcacttataggcaaaacacaaaagtcttgtgtgagctgtcgtgtcatgattctttgattagagcaagtgggttttgttcatatttgtggctgtggattatgcttcttgttgagagagagacacacgacagagatatcgtcaatcttaaccgttggaaatttctggatccacgcattagtcgccgcctctgccacctcgttggccgctcctgcctcacttgctgacttcatcaccaccgttgccacttcctcgttactaagtacatcccacacctttatacaagaaacaaaagaaaatcattatttaagtgggtcattcaactaaaacgaattattttaaatgtgggctttactttggatttggtcgtattatttgggcccaggttgattaataaaaagccttaaatgggtgggccacaattgaacatggattttggttcggttttaaatcaatagtaaccaaaatacaaaaacatagtctctcatataaaattaaagtgtggtgtggcaggtttttagtttatacttaataggtttagatttacgtaccccgtctgaagcaaggagtagaaattggtcgctggaagtgatttgatgcgtagagacttgcggagtcgcaatgacaccgtagcttttaaggaggaaatcaccaaaagcccgcgacatggctaggcctggtcggttttcggttggaagccaaactctcagaatgtgaggttccgactccaaagctaacacccttccgtttcttttccttattctctccgcttcgcctacaaaattaattaacccaaaaatgcttaaccataatgaaaccggtacgtatcattgtttacaacatcactttatccaattaacttcaaaaacttacttgggacacttggcttcaggtcattggtcaactgagccaccttggtttctccatcctcacttgttccaatcatgacagcccttgaatccccaagatttgccaccatcacttgatttccctgttcaaattaatattgttgttaataatacacaatttcgtaaaatgaacaatatttttgcaatgaaaaataatagatcccctaatatataaagcggtataaaacattaaagatatgaataacttacatgtttaacggcgagaacagcagtagttccagaagcagagcaatcatgaatctttttaactttaagaatccttttgtccatctccaaacacgatgtttcgcatatgagtttccagtctcgagtcactgaatgattattcatgtggcctaagagtatagatggcaattggttccttacgttcttgctcacaaacgcacctctcggtccatgcccatcaaacactccacataacgctccttcttctgttccatatccctacaaatttatcatttcattccgttaaaaacaaattaattgttttgaagacaaacatatatatattttcaaaagtataaagtaccaggtggagaatggcagcatcttggttcaagcccttgcctccggctaaagaagagacagagcccaagttttgaggaacaacatggtggtcagagtataaaactgcattttcttgtccataatcagttatctcataaatctgacttttatctgttgatcctcctgaggataaacaaaaacaaaatcccataattttcttttcttcttttgtgttttgcctttttttttttttttttttggtttgctgttttctgtatatgtaagagggagatgatacaacaaatgaaaaagtttgatacacgactttacttattgcatataccagttatatagccctttgtgaatcttatttaggaatatattaatacatacttttattttcatctcgatgacttgtatctttaggcatttaaaaagaatgatttttaattccgaggcggtcgatcaatatttttgtttttcataacatttttttaaaaaattgaatccttttgataattagaatacttgattataaatgagtcgtttccgccaattatattagaaataaagaatatgtaaaatgtgtcgactagtgagaaaccgaattatttgacatactccagtaaattaagaaattaatatagcttatgctgtaatgtaaggcaattatgtggctcctggtggcagtgacaacgtataacaatttacagttaattagttaaaaatatgatctggaccatcccatcccaatattcatttgaaagggcacatgacgtggtgtgattagtatcttgcttaaactactaattgatttattccaaaatataaatgagaatttggaagttatcaatagattttaccaacgggattcttgttctttgtcattgccaacaagtttagactcaccaaatatttaattatttaaagaaaaattcatccatccgcttgctaactaagtatgtaattttaaaatagaaaaagaaagagaactgatgaaatggagattaatctagcagactagtagtcagggtatgcgtttgatcttgaaagtttgagtaccttaaaccaaaaaataaaaaaaaacttcttttatttttgatttcgtgtagtggttttatcgttaatagagtttatttttgatcaatctaataacgtttgattcggtttttaatctgacaatagattatgttgggacaccaaggtacatacatagcacaaaaccatagttaatttcctccaataacctttttttttctatgttaactaacacttacataaaatttacagaaaatactcctcttgcattaatatagttttaccaaaaatgtttatgtaacacttattcttatgttgcaaaatgctatgtaacagttattgttatgttgcatattaatgcaagaggagtatacttttacaattattaaataaatattattttttctaaatttttgtaaacgaaaagaaaagagtaataataaacaaatgtgacgtaagtactttgtaattactaattactaattaagccagcttttcctgaccttttggacatatcaaacgatacaacagggtcaactctcacatcacatcctttttatcaatagttttctgtacttcttttaaaatattgatgatctagttggtcttttattcagaagtacagaactatattatacatttattgtactatacgttattttgaaaagacatattttagttttagttttcttagattaggtgtgaattaatttacctactctttattatgtagttttggaattttttagttaagactactaatcattggtaagattctaagattaatcaatatcggctccaaaaattaaactagttgactaaaaattttatgtacgtaaaatgtcaatacacatagcaattcgacattaattttaaaattagttttattcttatagactaccccgctactaaattagaaaggcacatgatgtgtcatcttgtaggattccaatctatggattcataatttaataatttagtcaaacgttattaaattcgtttttcatattcttctatcaaagttaggccgtaataataataaaaagaaaaagagaaaagagagaagttaggccgtacgaatgggatctaatatatatatagagaacggatgccgtacatgttgctggcatcgtcatctcctaaacccaaatgcatggcaacattttgttatttttattttgttttgagatatattttaggttttcctaaagtcgtggtgacatcgtccattagctattacctatccgagaggcataatttacgaactagactgttgctttagctataaggataaacttaagggaaagcgaaactaaattacatgcatatattttcatgaaatcgtgaagatttttcttttggataagccaatggatttttgatgaatttcttcccaaagaaacattgaagatcatgcaatcacgatctcgccaatatgaatatctacccaatatattaaaacattgaatatcaacttgatcgatgtattgactttgcaacattcaaagcaatttgtaatatttcttagcttctcgttctcaaagccacacatttccataaactaagatatccatgtacacaatgacgtactttaatttgtgcattatctatgtattcattcatatgaaaagtttgctgatatggttatcgggataaaagataagactagttacataattcaatttatttagctcatattagacatttaattcatcattaatagctgaaacaatattgcaaataccttttattagagagcccttgaggacttgatgaggtattttctcttaaaataagaaaatcatttatattcatctggacatttgagtttcttacttgatggatctagaacaagttgtcactacaggttttgagtatttttttcacatgcgaaactcacaaccatgtcatgaccaaaagatacaagaaaaaaaaaaaagtgtttcattagtttatgatctgaatattgttcccattgtgaggatctacagcacttgccgcctcagtcacaggcactttctttgcaagagacatggggatgtcaagatcatcttgagcacatctttgttgaggatgagttaacagcattgacattggcttgaaaacagaccgtgcaagcccttgaccgctctcaaatatgtaaccttcatactctgaaacatgttctactgcatcgacaagagagtcatacacatcttgtggacaattatcaggacttggcttgtcgtgcaggtacataacatccaacgtgaagagcttctggtttaagggccactcatgggttggtctcatagatgacctacagtatatgagaatctgcagggcgacatgaacaaaatcagtaaaacatcgtttatttttcaggctgtggctagaggagattgtagtttcacaaaataaaccttaccaccctgaaaattcggttctgtgctctggaaactttggcttcctgagctgctgctcggaagagaagtgtgagatccgctcgactagaggatttattacctgacaatcctctaagggaagcaacagcagattcagcatcacttgtgaactcctttttaagctgaaacataaaaaggcctcaagttcaattttcaaatgaaacaatcagcacagataatagtgtagagaggatctaaacaaaagtttcatgaaccaaatttgacattatttcccacacaacattcaccagtgaagcttatgttaaagcatcaaatgtgattctcacaacacatctagaagctacaaacagtaacaagaacaccattctcaggtgaaaaaaccatcaagtttcaatcaggtaaagaatgttcaacaaatcatgcatccatgaaaaaccaggtttaagattgaggattaggttcagaatatgttcaaagcaaattcaaatctccaagatgcatactgtatagcttatcatgaatttcaaaattttcaactaaaaatgcaaaattgaggagcatagtcaaaaatcaaaagaaagcccccaaattgaatcacataaagagaatcggagagaaaagtaatagtatacccaagcggctgatttggcgagcgtagcgaaagcaaagcgatgatcaggattaatggacagcttattgtgaatgaagagaataatggcttgcttgacgcactccatcctgatcaaaggcctaccattagttccagtggtcttcatctccaccatcgattctgcatctacatcgatacagatgagtatgtcctcgctttttatacgccccggtttaagcgcgtatcgagtcgttcctactccggtcacggccactctctcttcctccattcgccgccgatgtagtgaattctctcttctactttctacaattctactggttcgtccgatataaataaaacgatgcgttttggtgaaactaaaacacgacgtcgtcgtttaatgttttctttttttttctttgtacagagaaaaagtttcagcgttttgattcttttgacttttttgacgaatgggaatgagcaaaaatcgtttcattgagtagttccactaggacacaagagagattcttttacttctgttattgaggctatgcagtttcttggtgctttcttttgattgaatcgatcagtattagcaattgcggtaacttcgaactttgttaaatcatcaaaaaagtggtgcctataagaaccactattggtttttgacttgacattaagaaaatcaactgtctttagacttgagcgagtgataacgctatacaaaaaaatgacttctctctggttgtcaactacgttactcaatcgtccaactagtttcaggataccagttgagtttgcaatccacttgatgatcttcagttgaggattttgttgattcccgatatcttctcccctgtttgttccaaacatcacattatcagagagacctataaccaaaaagaaaaatagactcttaagtgttcatcagcattcatatcacatacctaacacatcgatttccaggagtgaagcttctagcatatcttccttttcctcgatctcagatcggaactgtcgtacaatgcttaaagtgtctgcaatgctctgttcctttctttccagctcacagcgaaactgtcttacactggctacagtgtctaaaatgctctgtttgaccttagccagctgttgtgtgacagagcaaggttcagggaggttcttaggctgcaagtctccgggctcagcactcgatttgtgggaccggcaagagggttctccttctgcagcttccttctccatctcgccatcagctttatgaacgctggagctttcgactcgagctcgcttgtatgtcttagtcttagtttctgcaagatcctcttcttcagccactggttgttgaaccatctcaaggattttgtgtccattctcattcatagaagaaatagctgatttgacagatgaatcatgaggacaaacacttagtgactgctccaggttcagtcccctctcaggtacacaagttagctcaggggtagaaacttctgctgctctctgttgttcctgctgattggaaaataagattgcaattaactatctacttccaacataagcgaggatgacattcatcttctttttacaaatgaaagatttcagtgtttcaatgctggtttcaggaagaaagaagcatgcctttactgccgcttctcttgggccttgacggtcctgcagaatacacaaatttttagaaccgtaagagaacaaatgaaactagacgacttgcataaccattggtactcaaaaaccaccttcatctgtatgagacacatgatgcaagtatattatctacaaacaataaaggtagtttgatacagtgcactagtatatgtgagagagcttacttctttttcattagcaacaacatcttcctgctttaaagcatcaaatgcccttccacatattgaatccactacatcactgggattagctaaggagacgctcgacaatttccctgcttctgtcagatactttttaatctggctagcacagttactgagaacttgttctgcctgcctccttgatatttggggaacctgaggaaaataaatggaaagaatttaacaaaagagattggttgctgaaaacaaaatggtaagaacctctctatatatgacctcatcatcctttttaacattaggtggaaatggtgaaagcatctttgattgcttattagttgactgttccttgcgtgtcttagctttcttcttctggggcctgcatgaagaaacagtagctattccagtctcatcccaagacatcgagttgatctcataaacaaaaattcacatcgagctattccagcaccacaaaaacaccagaactggagaagtaatgcttacattgtggaggcttcttcatcacatcccgtttgattagcttctttatcctgctaacagaaaatgtggaagcatgaaacaaaatccgggggatgaaacaaaacaaaaaaccagagatgagagatataattccccacctttgatgactttgattcattcagaaaaagaccacttttcctttctcatattcaagatttcttcatctccatcaatatagcgaacctgaaaacgacatagcagcagcagcataaacaaatatagcatattatcaatgacctggatcaaattaaaaatatgtatcacttaggagaatagactaatgattcaccaaaaaccaacgaaaatagctatgtagaagactgatatatttagctttacccgatgtctctctttagcagaacaatatgaaatgaccacagcttcataatacctgtggtaaaaatccaatactcatttacaggcatggtcgacagaaatgcaaccagcaaccatccgaggtgctagtccagattcagctattaaaggaaaatacatagcacagaaagaataaataaattgaagtagtatattaaagcacaaactacaaaatgcttacgcgcgatccaacggccaccagattttaaccctcgacccaactatcttttcatcatactttttgaaatcagatgtctgtcaaggaattgattcagcatgagtatacaaatttttctttttattttacattgttcttagcaaatgaaactagtatatacaaaagataaaacaatggatgttcaagaaaataatatctccaacatgaagagaataagaagctgaaaccatgaatagttattactacaattcgcaattggtaaggttcttcccagagtctttgatatgagcaacagttattaaacgtgaaaagaacaaaaacatactttctctttgcctaggctgtgtattctctttgtgtttgtcttaggttttttttctaacggttgcttcgctcctttcgttgaatctgaggctgatttatcacaggaaacagctggctgaaacaaaatcaaagaatgtctgcatcagcaaaagaagagaaaagtcatataagcatttcttaaccgcagtcaccttctttgcaggaggcttggggagatcaacttgagcacatctttgaggaggatgtgataacaacgttgacatacgcctgaaaacagactgtgaaagcccatgactgccctcaaagatgtaaccttcatactccgaaacacgctctatagcatcaacaagagagtcatacacatcgtgagtacaattatcaggacccgacttgtcgtgcaggtacataacatccaatgtgaagagcttctggtttataggccaatcatgggttggtctcacggatgacctgcagtacatgagaatctgaagagcaaaatataaacgaaatctgtaaaacagattcttttatcacgctgtggctagaagagatagtatttgcacaaaacaaaacttaccactctcaaaattcgattttgtgctctggaagttttggcttcctgagccgcttcctggaacagaaatgtgagatccgctggaccagaggatctagtagctgacatttctcttaaagaagcagcagcagatttagcatcgttggagaattcctttttaagctgaaacataaaagacctcaactttaacagtcacactagtgaagcttatgcaatacatcaaatatgactctctcaacacatttataagctaccatagtccaatgaacatcacgaattcaaaatttgacatctaaggagcatgcatactcaaaagcaaaagcaacctaacataaagagagctgggggagaaagtaagtcttacccaagcggctgactgggagagggtagcgaaagcaaagcgatgatcggaatttctggagagcttgtcgtggataaagcgagtaatggctagcttgaggcactcgagcctgttcaaaggcttaccgttagttccagtggtcttcatctccaccgtcgattccgcatcaacatcgacgcatatgagtatgtcttcgctgggttccaccgagtctcgagtggctacagctccggtcatggtggctctgtcttcctccattcgccgtaaaaggctccgtctttacactttcttcctcagttttagcaaagtgtcttccttttcctactttctatttctaattgtgtccgtaccagatgaaaacgctgcgtttttattagttgaccgaagattctcaagtcaaaccaaaatacgacgtcgcttgctaggagattttcgtcattattcatttcagtttttggaataataaaactcacttgtaagagaaaaaaagttaaatgcaaacggtgaaataaaactttaggtttgtattttgtagtttgtttgaataaatatgaaaataaatcttcagtggttacatactttttatatattttcatgaacttaattttatttttacgtaaaaatggtgatcatgaagtttaatgaggatgatgataattatgatataagaatacaggataataaaatgaaatagtcaaagataaaggagttgtatatacaattataacatacgtaatgatagtcgtacatggtttaggttttgggcaatcatagagtagcaattgcctaattatcacaaagttggtaaacacaattgttgtcttatttatgcattgcttggctcatcataacagattttggcattcgaagagttggtccgttgggttgaatgtgactgttattgagcttcctcttgttcatttccgcatacatctcttctatcatcggcttccatagcctaacccgcgcatttataaaccagtttgatacctttaatcacacacaacaaagagacacactctatatcatttgcccgctttaacttacttcagtaacaaaacatatgtgcgactacaatcctaggacttgagtaacattattgtgaattcaagaatacataatctagtctcatttgtagttcaagagaaaagcttgattttttcctagccctaatctcatcttaaaataaccaataccggtttttcagacatgactagtatgtcaagatatatattactcatttgaataccatatttgctatcattgtgagcaaagatgttatcaataagtcattgcataagaaaacaaagatcttatcaatgagtcattgcataagaaaacaaagcttgttatcaatgagtcattgcataagaaaacaaacatgagacattacctgacttcttgtcaagccacttcgtatagctagaagatgtttctccgaatctttcgggtaactgcattaaataaaacataactttgcttataaaatcgagttaacaatgtcatcatcataaagtagatagttaagaagagtaaggattgttacgggtgaaggaagttttggaacatccaattccgtagaaccgaaacagatttctcaggcaaacctcgttgaggtctccaaatctgatggttctttcgtttcagctgctgaagaaggcaatgctggtggaacatagaggtttcttgagtcttgtctttgcctctctccaatacagatcccatagagattatcttcttgcagattctctctctcaggttcttgtataagaaggaaacggtttggagggcaaaccgggtgtgtaactgtggatctaactcggttgcagcatggaacgctgatataaccgtatgaatctcatctacgcaatgactatatcgatcatccacctgaagagaaatatcaactcataaaacttcatcatatatatcaaaccatttttttaacttatgcaaaaaaagtgaatgaatatattacataccatttgaagaagatccaagagatgggttttctttgcttctaatgctctcctttgaaatgtagatccgaaacccgcctccgagttattagaatcaccatcaagaaactcagttatattctcaaaacgtgaagtaaaggctgaactagcagctcctgactcggttcctcgagatgaataatcgagcgagtatgcggcgaaatgagatagtatttcttgaacagagtgaaggtattttgagccaaatataagttgagagaaaccttgagtaacaacgttattagaaatgtctttgctgctgcaagaagcttgctctgaggctaatcttgtagctgcacaaagacttatctccgagcattcatcagaaacatctgatgcaagactcaatgaaagctcattgtttcttttattcgaaattagaaacgggaaatcttcttcaccgaatgtagacatcattggttcacttggaccaactacacctgaaaatgcctgaaactcactatttgcttcaaaaccccacatgttgtttgaggaatcatcatagtgtcttaaatgatccaaaggatgaagtggaggaggatgaggaggaggagccatgaactcaacattgcggttatcttgaacatcgatagaccgtggagaagatgataagtatttgttagtcagcatagaattgaaaatatcaaagccacccatttgtagaggatctgatctgatggtattccatggaagcattgttgagaatgaagttgaatcttctcttgaaggtataaaatccatgagaagaggattttggttagtcatgacattatccagagaactaaaagtgttgttgttgttgttgttgtccattgggtttctatgaaactgcattaccaaagaagacaagtatttaagacttagacaaaagatttcagaaaatctaagaaaccaaatctttggagaatagtactaaatgtaaaatgctgcaagagacagagaacatcgctcactatgtcattaaatatttcattaaaatatataaagaaccgaaacatgagttaatgaagccgtaactaggctcaatgatacacagaccaataatatctcaaagctatctgtgataaacagtgaactaataagtaaaaaagaaagctttagattactacaaatgtccatagaacattaaaaatgttgaaacttgcctttatccttcttcttctgatagaacctttgggaagatttcagacaacacaacgttccaaagagaatttttacatcaaaatttccaaaatgtgtgttaaaaactgaagaagaagataatgcttatttatcttctttctccgtgaaagaacagtgtactttcattccgcagcttctctatgttcctaaagagaaccaaaaagcagaaatcaacaataaagttagtattcataaattaaagagaacaaaataatgcaacaaaactgaaaaagagaaaagtgggtctgattaatctcttttgcatgaacgcaaacacttacaaaaaaaattacttactttttcttacaataatttcatgaagaaattcataatcttcatcatctgcctcactaaaagattcagagcactagatcaacaaatagcaacattttataactaaataaacaaaccaaaagttgtattatcgaggggaaaaatacaactttaatattcaagaaagaagaagttgaaaagaaggagggccaaatcacgtacggagctgcctctgtttatgacacgaatccattttcatatctttaagatcttccgaccaaaaaaaaagataaatcagaatcaagaaaatcttatatataatcactttcttaaaatgtcatttatttaaaatgttgttcatagagaaagagatgaatctagtaaaattatctaaagaaaatatatggttgaaacagaatcgaaatccaaaaaagaaatccaaagacatgaagaagaccgatgtgttactgtttactacagagaagtgcactcatttctgttgcaggctttaaattagggaagagaccctacattttactatttacatgtctctatatatatatatatgtatgtgtctctatttataaaattttataaagttataagaaaatggtgttgtcttcttgtgctggtttcaattatcacaaatcagaaagagggaaaaaagtaaagaagggtgagatcttttttagccatttaaggagaattgatgagatgtgtgatccatttgggttcttgctttttcttctttcttttctcaccactcgtgtctttgtattgtgccatcaaatcttatatccatttacgtatttttttcatataagttttttacgtaagctttacaaaaatatcaatcaatttgcttggccttttctttgattgttcctttcttatcatttttatttatttatttatttattttaagttcaatgtgtcgttatgtgttacgtctttattatcatggctaatgatgatggaattgaactctattactcgtagactatatagattgcaacatctgaaattatgctcttctttattacaaccaaaagaagaagaaaatctaatggtacttgatttgatctgtattagcgtgacttgatctgtattttaaataatgttaatggtacttgcctaaacaatgactttctaagctggtatgagacaaagaaaagggtcaaggacaagtatcttgcatggccactccaagcaaaattggatattgatttggtgaaacagttattgttgttcgtataggacaaaattattttcaatagaaatcgataattattgatatcatatccttattattgtttgcttacaagtctatattatttaatagtttgaaattttgatttagtaaagcagaatagtatcaataacactaggaactatagtaccgactattaactgaagctggaatgcatctttaatcatgcctacgatcttaatcaataacacttattaatgttagactattagacccgtgctcataacttttgggtcctaggcgaattataaaagttacttttttttgttgtctgatagtccaaacaagaacttgtaatgctttttctaaaatgaaacaaaatgtacgttggctatggagcctatcgactccagcaccagcagatgcttaatctactccatagactagagcgctttttatctgaagtcgtataatttcccaagtcatttggcttaattattgtgtatcaacttatactatatgctactgatgtcttgcttagaatattatacaagttcattgacttagaattatatataggcagactaagcaaaatgggaataaatgatcacagagggcattaactagttcactgaggttcaacaatctacttgatcttaactcctttcgaattaatatagaagtcgagcacttgaggatcagaaaacacacattcattctcagtgtctgaagcacttgagggtcagaaaacacacattcattctcagagcggcgtataattttaagatgtcaatcgctcttacgtaaagatcgatagccatccacctaaacatatgcaatactccttctgtgaacaagaaatttattgataaaaccaagtgtgttagcaagttaatctttacatagaaatcaaggactcactcttaatgaccagcaaagtgtgttagcaagttgagtgaccagcaaaattctaaccctaaaaaagtaatgtagaaagcaagccctcattatcacctttaccgtgacatttggatttccatctctatcaccacccatccaggaaccaaactttagtggattcattgatgcaatgcagatagaagaagaatagaagatgatgcaatgcaagaaagacatcccttgagagagcccaaaccattcaccttattccaatacattaaaaggtgtggtttttcccaaaaaaaaattaaagtaaatttttacttttagaaaattggaaagaaaatttacaaatcagataaatgagaatttacagctcaatatttccatatcttccaaatattttccatagattttattttattggaaaaagtatcttcttaaaataccttgagaggttgtttagactttctaaaatttattggaaattaatcttaaccatatgctttaacttttgttatttacctcgacgggccgatattatatatatagcaaaatttgattttcgtggaacttataggcttctctgctgatccagaaggagatgaaagtgatggataagaatttagggttagaggaggttcagaaacttgaaggtcacactgatcgtgtttggaacgtcgcctggaatcccgccgctgacggtgttattgcttcctgcagtgccgataagaccgtacgaatctgggagcagagttctcttactcgttcctggacctgcaaggtctctcttctctctttctttcgaatttgatgttgttagataatgtgtcactaatgaacatgaagcctcgtgattggtcaggctgttttggaaggcgcgcacacaagaagtgtgaagtcgttagcttggtcaccgtctgggaagtttcgatggcaatacttgcgtttgggaaaattttgctactgactccgagtctgtctctgttttacgggtactaaatgtactatctcaaaggcctatcctttatgtgtttgttgacaactgaaatttattgtagggctttgatgtccctctgggtttcttgactttttaaaatctcgtggaattttcttagggacatgaaagcgaagtcaaaagtgtatcatggaatgcatctggttcgttgcttgcaacttgtggtagagacaagtctgtctggatttgggaaatacaaccagaggaggacgatgaatttgatactattgcagtgttaactggtcattcagaagatgttaagatggtcttgtggcatcccaccatggatgttttgttctcttgcagttatgataacactatcaaggttaagagaacaatgcttcaaatgtgctttcatgaattggtgtcatatctatgcataagcatttaactgcaatgcttgtgtttctattaacagatttggtgctctgaggatgaagatggtgattataattgtgtacaaaccttaagtgaacttaacaagtatatcctctatttgtctcttctttacttctcacatgttgaaattttcctaccttgatgctattgttttcttgatatttcttttatgcgtttagtaatatatgttgcctttaatcttcactcagtggtcattcttctaccgtctggagtatctcttttaatgctgcaggggacaagatggtcacttgtaggttggtgaatcttctccccattgtttcggataggagatttcatctctgttacctggtctgttaacatttggattgtctgaactttgcagtgatgatctagcagtgaaaatatggaagacagatatttcaaggatgcaatctggtgaaggatatgtaccctggtgaggatataatggcattcaattatcacttcatagagtttagcatatacatctttcctcttttgaagatgtattttttgttattgtatggtctataagtttgacataagatacatgcggttgaatattcttcatttgctagggatttcatgttctaacttgtagctaatgaaatatttacgtgcttgatttttgcaggactcatgtttgtacactctctggttttcacgatcgtaccatatattcagttcattggtcaaggtataaacttgttgtcacttttgagggatttgaaagaaacaattgtaaagtcctactatattcccatgccaaccaagaagatgatttcttacacctgataaatgcacttttttaatctagttcattgatcaaataaagctaaattagtaataagctttgctgaccaatattaattgtcttctatgtgtcctactggatagatcgacataagtttatgataagatctgataccttgatagggacggtgttattgctagtggagcaggcgatgatactatacagttatttgtggacagcgacagtgactctgtatgcccttgtcccttttacctataatcacaaatccctcttttagtatcatttagaaaatatcattaaccatatcttgtccggtttacttcttggcatatgctctgtgtcatcattgtagcacaacacaagaaaccaaagctcatggtttcttgattgaatttttcgtttgctttagactctagccagtgatttttcattacatacaatataccttgtgtacagccaaattgaaaagctggtcatcattgtgtcaggttgatggaccttcatacaaacttttggttaagaaggagaaagcacatgaaatggatgtaaattcggtccaatgggcacctgatgtaagttcatttcctttcctaaggagtaattggctaaatatgtaaacaaatgcagggtaatcttactcgtatgttggtactgagtttggttcataaaaaaaattgaaagcttgattttcttgtttaaactagttttagcatatacggcgaatcatctcttgctaaagattctgaaatcgagatttgcattgcagaaggaaagccggttgcttgcctcggccagcgacgataaaatggttaaaatttggaaacttgcctcggagccatgaccagacggatacatattcttttaatttgttggtttctaacttagttagaatttctatttcattgtttaagtaggaggaatgtgttctcttagttagattttcctttagtatacacagagatgcagctttgcttgtcaaaaactagagaaaggatatctctatttaaattaaaaagggtcgcctgaattttcagccctatactaacattccaccctaaatttttagccacttgaaaaaccaccataaacaattttaatctcgataaaactacatgtactttcggatttgttcttaaaactacgcctccaattgaaccgaccagttaaccgataattatacatccggtttgacttacccataatttatccaaaactaatccgattttgactctattttaacccaatttatacccaaaaaatatattctctagaagaaaaatactttttatttatttttatttatttttgataaaaaattaaaaataaattaattaattttaccaaaataataaaataacaaaatataccgcaaaataatataacaaaatagacaacaaattctttttataaatacaatggtgttatatatataaatgtatttggtatatactctaaatttaataattcaaaagccattttctttttaaaaacaccataatcatatataaatatatatatatatatatacatatataactcatcttgaatatataaaaagaaaactgaatctataaagaaaaataaatttataaataccataagatatactttgattgtggtgtttatggatatctataaaaataaatttggcatatattttgaattttattacatatatagagttcaaaggtcatatattatgatttcaagaaaaatgaatatttttgtttaaaaaaagacatagctttaaatttataaaaaaatataaatgattgccaaaaggaaaatgtatatgtttgtatattatcaaaattttataacaaaatgtagctcaaaatataatttggggtatattttgtcatattaagttttgctaaaattaagtaataatttaatatttttaattgtttatcacaaatacaaattaataaaaatacttttacttcttaataagacaatttatttacattttgtgtgggtcaaaattaggctaaaatagagtcaaaatcagattagtttcggttaaattaggggtaaatcaaatcggatgtataattatcggttaactggtcggttcaattggaggcgtagttttaagaataaatccgaaagtacatgtagttttatcgagattaaaattgtttatggaggtttttcaagtggctaaaagtttagggtggaaagttgagattccaactagtatatggctgaaaattcaggcaacccaattaaaaagaaagattatgagttttgttgagaagaaaacacgtgcaataaagagctttttggtttcttcttttgtgttcactctggaaaagatgtttcagaaacagaggaattgcagagtgtagcacacccactcttattagcatcgtgcaaaccgcaaaaaaaaaaagatccttaatcttttgcgtcgtctaatccactttgtgtatggaaatattggaatggctaaagttgctaaaattaatcaattagctcttcaactatagagtttgataagacatgatcgtcatcgactaagttgatccatgacaactggccgaccaaataatattttagcattgaaaatttctactgtatatgtattttcaaaattacattcaatgataggatagtgacaaatattaatctgaaaatataacattgtctattgttttatttctaagttgaatgtaattttgaaaatacatatacgtagaaaataatattttagccaataaaaactaaaaagctctatatttattcttgttcttttttttcttcttcaccaatatatatgtttaccagtttagccattccataatatattattttgtttaaaaaaaaaaaaaaaatcaaatggggaccaccaaggacggtacattcatttgattttagagaatggttcaaatgacggatatattagcgtgacattttgataaactgaaaaaataataagtgaagcagaatcaaagttgccacttagtccggaagactgtgattgtgattttgaatgaactcatggaacaagtttcctctgtaaatttttctcactactttgatttctcatttcttctctgattttgtctttttgtaatgttcttgttcttgttttgttttggtgaaacagagatcaagctctctcactgtcggagagcaattctgcgccgtctttatacctttctttgccattatcgatgtcctagtttcctccgtcggacaatgcttcgattgccgcagcacatcgcctcggacatgtcagcacgcggatctggaacgtcttgctcgtgaatctcaatgttggttttctttttgtttttgcctctctctctctctctctctttcatttcatgtccaatgtgttgtatacgttcttggatcaatgcgtcttcgaaatgactctgtttggaagttgataagtttgaaaagtttgtttcttttttgcagtttcagtcaatgaagttgaagctttgtatgagctattcaagaaattgagctgttcaattattgatgacggcttgattcacaaggtctgttttttctctctcagatatgtctagttggtgaatttttcataggttgatgatcatcacttgactccttttcctttatgtgtgtgattcattgctttcaaggcattaagtttgctctttttagatgatagttatctctcattataatttatggttatgaagaaatttgatatttctggtttcctaggaagagcttagactggcgctgttccaagctccatatggtgagaacctctttcttgatagggtgagtggcttctcatggtttcttggacttgttgagatgaaagttttttttactttatattgattggtgttttgcaggtttttgatttgttcgatgaaaagaagaatggggttattgagtttgaggaattcatccatgcactcagtgtctttcatccctatgcatcaatccaggagaagaccgattgtaaggatcaatattactactaatataactccttggatgatctcaagcatatgcttttattatctgtgacagttgcatttaggctctatgatctaagacaaactggattcattgagcgagaagaggtaaataataatctgccattgcaagttgcaacccttcttttcagcttcataataagttggacttgttaggtgcaacaaatggtttctgctattctcttggaatctgatatgatgctatccgatgaacttctgaccatgattattgataaagtgagttcttgaaatcccatctctcttagtgtgatgtataatattttggtaaatttagttagcacatgcttcttttctttctctactttgtttttgctagacatttgctgatgcagattctgacaaagacggtaaaattagtaaggatgaatggaatgtctatgtgcataaacatcctagcttgttgaagaatatgactcttccttacctaaagtaccaaatcctctctcttttttagattagcccttccatttaggatttcctttactttatcatcaaccatatctgtatttgaatttgaagggatgtgacgacagcattcccaagttttatattcaacactgaggttgaagactgaggcacaactgtccatgcaacaccggtcatcttttttctgcttggtcctgtaattcgagtgagattgtcatagcgcaagagcagaacgaggaaagaaggttttccttattttattttaagccaacgtagttgatgattattagctgtaagtaaaattgtcaagcactttgctttgttttgatgactttactgtaattgttccattgaaagtaatgaagcatttttcttttcatcttgcgtctatggcagtatagttgatttaagtcttgattctaccaaagtttgtgttttgttttcggtcaattgtggaatatataatttatagaagatgtattcgaatgaaataatagagtaagagacagaaagcgtataatgagaacactatggacagaatgtgaaagagaagagtgcgtggtgagagaaagggacacaacacaatgggacagagcagtaatcaagcagacactgcagctgcgacttgttcttcctctgggaggagagtgcacaccagtttcctgtctccatatacattgtccacacgccctgttccacatttcaatcatttgtcacatatcagaattccgaaaccagaataaactgaatcgaaaaccaaatgtgcaatctatatcttggatggtctaatacctgtggtgggccagaacttggaggagcggagccaaggcgcagggaaagcagcatactctcgagaatacggctttttccatgtgtctgccattagcaacgatgggggatgtggagctccctgagaaaacaaacaaccaccaacgtatgaatctcaacttctccgaacaatattattattggatataattatgataagtctttgttttcctaattaccttgagaacgttgttctggacatctgcatttcctttttcaatctgtgcaatttcttccctgattgaaatgagagcatcgcagaacctgtctagctccgcctgcaaacgaatattatttagtttcatcaagttgatacactgagagaagaaagagtcaatgagagatctgcatatatccatatttaccttgctttcactctcggttggctcaatcataagagttccagggacaggccaagacattgtgggtccatggaatccatagtccattagccgtttcgccacatcctctggttctattccagcagtgttctacaaattcatatttgaatcggtcagtgatatgcatacccaaaacaactactttaatttcagttcacaacattttcataccttgaagcctctcaagtctatgatgaattcgtgtgctactgttccgttaacaccacggaaaagaactgggtagtgtttctgtaaaaacaaatcaagaggaaaattagactcctttcattctcaaaagatgaataggtaaatagaagacaaagatgttctactacctctaggcgctttgccatgtaattggcattcaaaattgcaatcttagaggcatcagtgagcccaccagatcccatcatggcaatgtaagtataagatataggcaagataagcgcagatccccatggtgcagcggatattgcacccaaaggtgctgtcttctcgggttgtgggataccaccagtcggtatctgtatacatggaaatggaagaaacaaaaaattaaggaattaatcatcaatcaccaagaaacataaaagtgatgaaggataaaagactaaccacggggtgagaaggaagaaatggtgccaaatgattcttcacaccaatgggacccataccaggaccaccacctccatgaggaatacagaaggtcttgtggagattgagatggcacacatccgctccaataaaaccagggctcgtcaaaccaacctacacgtacccaacaccatgctcttacaaattagagaaaattcaagatctctgtgttctgttttagtaagatatttcacctgtgcattcatgttggcaccatccatgtacacttgacctccattttcgtgtattatgttgcaaatctcgtcgatgccctcttcatagactccatgagttgaagggtatgtaaccataagagcagctaagttgtctttgttggcttctgcagcttttctcacctcctcaatgttaatgtttcccttagcatcagttccaactgtaataattttcatcccgcacatagcagcacttgcagggtttgtaccgtgtgcagagacaggtatgatacacacattacggtgatgatctcctcttgactgaaaaatgcattcattcattcacttttcagcttaatacaattgaatagaagattgttaggtagaataagatccaaatttaggataaaagatgttaccatgtgatatgcgcggataaccataagcccggcatactcaccagcagcaccagcattaggttgcaacgagaaagagtcaaacccagtgatcgtacacaagaggtcacccaaattttcgaacatttcctacatacatgtggacaagatatcagttcattgttcaactttctaaatcagacctcagatgaatcaagaaagtcactaacctgataaccttgtgcttgttcaacaggagcaaaagggtgaatgtcagtgaaacttggccatgtgactggcatcatttcagttgttgcatttagtttcatcgtacaagatcccaacggaatcatgctgtggcacagtgatagatcctttgactgtaacttgtggatgtacctaagcaactcatgctctgtgtggtacctaatcatattatcaaaatggaaaacaaaaatgagatactgccaatccacaagtaataagccactcaagattcaaagaacagaataatacatgttgaagattgggtgggtaagataaggactctctcttgttaggctagaaggaatggaattctgaacctcgggtgctagagattcagccgtaaatggaacctgaagcgaattgagatagtcaaatttcatgcaaggatcctagaaatgatatatcaataacaaaaagaggtatgaacaacactcacaggcttgccagaagcaaaaactttgaaaagtttatcgacatcatccaaggtggttgtttcgtcaaaggaagcagtaatctgaattaagtaatcatatccaaatattcaaatctgtatgatgctatgagagtaaaaaccttgaaaggccaaagcaaaggagactcacagtggttgagtccacaacacgcagattaatttcacttttggaagctgcatcagcaattgcatgtgcatccgaacacttaattttaacagtgtcaaagaaaggaagttcttgaacttctgcaaccccaagcttgttcaaccctaaggaaaatataccagcgagaccatggacacgctgggcaatagattttagacctgcaggtccatggtaaacagcatacatggcagccatgttggcaagcaacgcctgcaggaaaatgaaaagatgaagtactcatcaacatgaatcaacatatcatctagttatctgaacgaactaatagtgaaaagtgaaaaatgagtaatcagatactaagaagtaattacttgagcagtacagatgttgctagtggctttgtccctcctaatatgctgttctctagtctgcatagccatacgcagagcttgctttcctgaagaatcaacactaataccaataatcctcccaggcatcattctcttatactcttgtgaagtagccaagaacgcagcatgaggaccaccataacccatcggaacaccaaacctttgagcagagccaacaacaatatccgccccaaattctccaggaggtttcaacacagtcaaagccagcaaatccgtagccatcacaaccttaacaccattagcatgagcattcttaacaaactcagcataatccaagacttcaccttcagtaccaggatactgaacaagaaccccacaaacatcaccagagctgtaatctatatccttaagatcagaggtgacaactttcaaatcaaacccatcagctctagtcttacaaacatcaatagtctgagggtgacagttactagcaatgacaaaggtcttctttttacccttaagaatgttgttacacatggccattgcctccgcagcagcagtgccttcatccagaagcgacgcattggacataggaagacccgtgagatctgtgatcacggtctggaaattgaggagcgattcgagacgaccttgagagatctcagcttgataaggagtgtattgagtgtaccaagctggattctccatgatgttacggagaatgacagtagggacatgagtgttgtagtaacccatcccgatgaaggatttgaaaaccttgttcttggaagctaaatcaaccatgtgttgaatcatttggctctcggttaaaccagcgtcgaatttggagaacttcatggaatctaatcgaatcgatttgggcaccgtagcatcgatgagtgaatcgatatggtcaaagccacagaatttagccatgtgggtttgttcgtctggtgttgcagagttgtgacgacgagggaaagtatcgctgggtttaacagcatcgacggagatggaacgcgtctgctggtgcctcccgaaagccgccgtgtggttgacagatcgaggggtggagatgaaaggggaaagggaagagacatacctcgccggagcgtgaggaacaaggtgaggtgtttcagcgttacggtgtcgttttgtgtcgttaacgagacgtttgacgattcctctgtaagcaagtctccttgcgcgctccattgggaaaaaaggttgcagtcagaaaacgaagagagtaagagagatgttttgagaaagatggatgtcttttttagtttttcgccatgaatgaaaggaggaggtagaagctagctacaaggagggaatctgagagagagtatatacaatatacactcacggaccgttgaatataaaatgtgtatattcacgtcccaagaaatagttagtttataaatacagagaaatttttgggaaataaataaaaatcctcaaatttcgtggtgtaggctcggatgtggttggtgaaaagttgcagattccacgtgtatcgcatctaaatcagtagtgcaatattgtgctaatcattttatttttatgattaaattggatctccgacatctcttaattatttgtttattagtagcagtttctccaaactatttacattttttcacaacaatatacaatattttttattgagtactaactattgtgattttaaaagtaggattatttagtgtctttagttcgcaaatttcttattttcctacaaaaactgtagttcccctctaatgggacatacgtaaattgtaaagtttaatcaatgttaagtttttttggttctgatttacatatccaacaaaaaagtacgaaaaaatagaatttatgcaccaaatccttgagataatttacaggaattgtgggatatgctgtaaaagcacgagataaaatttgaaaggaagggaactgaagtggaagagattgggtatcagtggacaaaaatgtttgtcacctttatcactcagaaagataacaacaaataaatatatatatggcaaacaaattttaattattttggttcacatgaaaatatatgataaattaggtggcggaatgcgtttcacagagagtttatctccacaaagaaaattttaattaaacagataaatatagggttcgtctttttcttcatcatgcatgggaaccatcgtcatccatatatatatatattcgacagaaaatgaaatattatagttttcgaccttccaagaataatatatcttaaagatcgtggaaaagattactcatgagtcatgacctactctttttaaaaacacttagttcatatatatggttctattatggcgtttcttgagctaaatcaaaatgaaggattagaatatgctcgaaaaggcgtcaagaaaatctttggatttcagttgcatacttgcttgtaaaaactaattgtatttgtttttgttttttgttcaaaaattaattatttgtttaccagctacaaaaatatataacatgattgataaagagtgaatatctaatagaattgattacaaacattattttgaaacaaatagagtgataggcatacctataataattctgtccaaaagaaaaaagaaaaaggcatgcctaaatttattactttcataaacaaatagtaataatgaaaagtgatcaagcccaaattgcaagagcagacatcatcccagctccaagaaacaaaaagcaataagaaacaacttgaactctgaaatcaacactcatcttcttgctcaagaaatccgcagcgatcaaatccacaagcgccatgtacacaagtatccccgcagagagagaatcgagcactccttcagccaccaatgctgcaacgctataagagttgtaagatgaggcaatggccgttcccaccgctacaccgatcggagtagtgatggcgaagaagaaagccatcatggcagatccacgcggggttagtctggcctctgcgacgcagccaccgagggcaaaaccttcgaagaattggtggaaggaaagagcgagaaggagaggacgtatggtgcatgggctatgtgatactccaagcgatattcctatgattattgaatgtgacactattcccatttcaagtatctgaatacaaaaatataagggtatcatcaattgattttgtgcatcgacactatacaaggaaattatataaacggattggtttgactaagtcacataacgtcaaaatatattaacacacacacacacaccaaaaaaaaaaaatgtttccacaatgcgtttaagtcgtcatttgtatctttggaagaaaacttaaataatagtatgatattttagaattatcttattttttcgttttcatattaataatgttttggtagaatgaacatgaagtagtactatatataatagttacgaagataacattaaataattacttaaacaagcaataaaataaattttattatttttttcaataacaaaatctatatagtgattagcaactaactaaacttggcattgtaaaactttatagttgattactataacaactctaaaacagcttatgcaagtcatgtacagttattagaattcatccaattgacttggctacattgtatatgaatgaagtcaactgcatttgaaataaataaatcttattagcattaaagaactcaaaacttaaaagtcagagcttacgaaaaacaaagtcaaagtcaaaaaacatatgaagaaaagaaaaaggtcgtttacctgagaaacaacaacgtgcctcacaccactgtccaagcctacgtccccgtggccgtggctgtggccgtgtccatgaccggaaacaccacttctcttagagagagcctcaaaaccttcggcacccatggagaggctatgacggtgatgctccgcgtgagcccgcatccccacgatatgcaacgcccctccatcttcttgatctctcagaaaacccgattcaagacctgggtcagacataaccgaaacttgcgtaccaagcgactcgacggactggttcatcatcttctcctgtttcctctcgtagtatcccgtgatcatgaaatccgcgagcagagtaagaagcgccgcgaccatggcgaagaattctggaaaagggaacattttccatggaaactccggcagacatgggtcggacaaagctttggatccgcccgagagcatgtgaacgaaccctgttgcgaggataactcctgctgcgaacgctttggctcccctcattaagccaccgtttaacggaagtagggttccaactagaggaatcgagactccggcagctccggagataaggatcgacgccatagctgcgaacttgagggtaagagcagctgcgtcatctcggcacgggtctgagtcgcccgagtcacagctagttgtgaacgactctgttttgttacatgcaaaaataaattgagttaactttgctaagaaaatctcaaaatttgcatttaagtgtgtttaagagcgaaatgaagtaattgctttgagatttgaagtgacaatacctgtcaaaccagatgataatggtcgaagaaactgccaaaaatcctgaaaacattatgaggcaaaattatgtgaggaaacaggattgaagaagcaaaataacattaaatagatgaagtggaagaagtttcagacctgtaagagagacatttactaaatccgattaggcgattaaacttgtagaattatataaattattgccaaggaaaccagcaagctaagtatatatgggttattaatattatggagttgtctgtgtgttttataaagaaagattgggagaatgtcaatcagtgcgagggtttgtgtgtgcgtgcacgtacgttaacaaggtcacatgaggttcacgggaatcaaatgaccatagaatgtcgtcattttcatctagtaccctcattgacaagaatattaaagtttggaagataataactacgagaaaacaaatatagaattagagatgagatgtatgagaatgttttgttataattgaagtctttgttcgtatcttgcatcagaagtatgactcttgtttggtcaacttgcagaaaaatgactattacaatgcgaaatactagtaatgttttgcgtcttaataaaatttcattcaaaagattatgtaagttaggtttgcattttacagttgattttgtttttctcctatctcatgattctctgttttaataattaaaagttaaaatttagaaaatagccacaaacatattcaaaaagtatatatttgggccaaccggcccagtaagggaagaatgttccttaagttgcctaaatgagcgactgagaaactggcccacaaaggccggacctgtatcattcacaaccggaaaactttaaaactaataaaccaacgttcttaaaaaagcgacactttgggccataatttgttgggaagggaataagtaagaatatgctttgggcatatctgatgatttatatctgtctcatctcatctctcatcgttccgggagaagagaagagagacccatccctcacttcaaagttcaaagtctcgaaggatcttctccaactctctctaaacaagattccaaattttcaaaggtaagcaatcgtttcttctaatgaatttcatttctccggttttgtaagttgagtgatttcgttttgaagaaactctgaatatgataggaaatcaaaattcacagagttttcattcagttgggttttctctgaatttcatcaatgtacttctttcttacatttactttagttgatcaaataaatatccagtctttgacaatagctgattttcagattcgataaaagacttcaaatttcgtgtgttttgattcttctcttgttatggacgtagctgatttaggggggggggtgtgaagataaagtttcgatttctattcatgtctttttggattttgatttgaatttgaagttaaactagagaaaatcagctgaatccttacttgttatatggtatgaaacatctacttgatatgtcttgttctgctgaaccaaattatgtcttgaaatcttagctgcttttgtttttgcaggtgaatttgtttgatagaatcaagaacaaacctttaaaatggcgcatctactttcagcttcatgcccttcagttatctcacttagcagcagcagcagcaagaattcagttaagccgtttgtttcagggcagaccttcttcaatgctcagcttctttcaagatcttctctcaaaggacttctcttccaagagaagaaaccgagaaaaagctgcgttttcagagcaactgctgtacctataacccaacaagcaccacccgaaacatctaccaataactcatcctctaaaccaaagcgtgttatggtcattggtggagatggttattgcggttgggctactgctctccacttgtccaagaagaattacgaagtttgcattgttgacaaccttgtaagacgtcttttcgaccaccagcttggacttgagtcattgactcctattgcctccattcatgaccgaatcagccgatggaaggctttgacagggaaatcaattgagttgtacgttggtgatatctgtgatttcgaattcttagctgagtctttcaagtcttttgagccggattcagttgtccactttggggaacagagatccgctccttactcgatgattgaccggtccagagcagtttatacacagcacaacaatgtgattgggactctcaacgttctctttgctataaaagagtttggagaggagtgtcatcttgtaaaacttgggacgatgggtgagtatggaactccaaatattgacatcgaggaaggttatataaccataacccacaacggtagaactgacactttgccataccccaagcaagctagctccttttatcatcttagcaaagttcatgattcgcacaacattgcttttacttgcaaggcttggggtattagagccactgatctcaaccaaggagttgtttatggagtgaagactgatgagacagagatgcatgaggaactccgtaaccgactggattacgatgctgtgtttggtacagcacttaaccggttctgtgtgcaagctgctgttggtcacccacttacagtttatggtaaaggtggtcaggtaaatgactttcttgatctgttttcacatgaaatttcaatcgaaaaatttgaggttttgattgaagtttttccctttgcagacgagaggctacctcgatataagagacacggttcaatgtgttgagatcgctatagcaaacccggcaaaagctggtgagttccgggtcttcaaccaatttacagaacagttttcagtcaatgaactggcttcactcgtcactaaagcgggttcaaagcttgggctagacgtgaaaaagatgacggtgcctaacccgagagtggaggcagaagaacattactacaacgcaaagcacactaagctgatggaacttggacttgagcctcactatctatctgactcacttcttgattcgttgctcaactttgctgttcagtttaaagatcgtgtggacacgaaacaaatcatgcctagtgtttcctggaagaagattggcgtcaagactaagtccatgaccacataaagtgcagaccaatattacacataaggagagattatgaaagagatgatgtgttgtttggtatcttcaaacttcatttctgcaaaagacttgctaggcttaagaggttttgtccatattacattgtgcaggttctttaatgttagatcttaatttcgatgaaaatgttataatgttgccttaaatgttatgtaatgagaaaaactatattatatgaaaaataagaaaatgttaaataagtaacagaaaaccatcttttacttcagttaagagaatctgacgaatatcgatcaatggttgcagaaaaatttcttcgagatcttagacgaataaaactgtaattaaatttcttcaataaaatctggtttaaaatttatataagttacgtaatacttttggtgtattaaatttaaaataatggagagtggtgttggtgggtcatcgtcgttggctatttttaaaaaatattaatgtcttttccaaatacgaaggaaacttgtggggtcaaactctaaggaatagagtgggttttgtataattataattgtagccctaatgattctctcgttttttcgtatactatttttctaaagaacaataaacgattcgattactactatagttataaaaaaaaagaaacagcttacacatattttcactttccccatttattttgtttgacgaaaaccacataaccaaaagtaagtcgatatcccaattggccaattcccatttattttttaattgaagaaaaatatgcaatatgattttattttttttccgtcaaaatatgcaatatgattatatgaataaactgcactctatctggactctgtgttccgcttacgtacgtctatgattttttttgcgtgcttttctttgaaactatcaaatgaatccttagtggccgagctgccaccatatctcagagttacacgtaaaagcgtattgggaaaatttaatattcatgttgtgcgcctcttaacacatttgtatctacgattttgtctctgttgtttttgcagcatatccgaaaatagcaccaatgaggaaaagtgagagagcttgctgtccaaaaagtgtatatatttttattcaatttttttaatgctacttacaaatgatattgaaaaataaaagaaactagatataaataataaaacaagtggatggaatgatcaaataattgaacaaacaattctccatagttaacacttaacactattcaacttaactgaaattaatagtttgaaagcgtggaggcttttggtgtggaggcactgagagttttctttgcattttattgcaaatattaatatcattatttactaaacatttgttggagagattgttggttatgattgatgagctcatcatcctcggcctccatcagtattcatcaacttgcgaattaaaaatatatacaaaatagcataaccttaatttcgaagacatgtcacatgatctcacacaaaattcttaatcccacaaactaccaccaagttgtatataggtcggcaagtttttttcttttttcaagttaatttcggatgtatgaacgtatgtgcatacactttacagtatggttttgaaacttgaatatcaaaaatttatctatggaaattactccttagcaaatgatatctgagtaacaaagaataatagtattttgtaacacgcacaaaaatatgaactagtggaatatattaaaaacgatgtctccgttacttcgcctatactgaaactcgtttgagttttaacaaattaaaggtaaaaaatatattacgcttcgcacatgcaaaaaataaaaatgactgcatccagatcatccgaagctctctcggtaaactagcactttagtgtgagatcagcacctaacatttatttgacataggtcaaccttgacccttgaaatgtggaacttggacttttgacctcattttcctcaacctactagaaaaatcgaccggtataaagaagctacatatagcattctattccaattaccaactcgaaagaagaagaagaaaaaagagaaattcttggtcttttctgaatctttgaaaaagaaaatcaataattgtggggaggacaaaaaaagagggtttgtttttggagatgccacttaagcccagcgtcgctgtcaaaaccccctcaattattgaaagtgggtcttctgattcattcatttccaaaacccttatgaatttataaccaaataattcaaaaatgtatatacaattccacaactaacctttttctcaaacaagatacgtttgtttaattaagggaaagattaagacatggaaatttcactgaaacttctaatgcataaacactaccgacttcgtacctaaacgggatcaagaaacaatcacgaaatcgtctgacgacttaggatagtcatctccattttttgagaaagatttagcttttggtattttcaattataccgacgtttatatttgttttttgtttttctaaatagagaatatttccttgaataggaaattaacgtgatgccgagagcttggagaccttacaaataatagtagaatcttcttccctcgttttctctactttatttttcaggaatattaaagaaagaaactttgaaattatcgacaaatcgtattcatatcatcatcagattataaaagatttctaatttaccaaagaaataattactcataagtccgattaaaatcacaactactcagacgaattatatatatccagatcctatatatcagaagaaaagaaaagaaaaacaattaccaattcaagtaaaaggtttctgagctaaattgttagatcgttaggtataaacatcttgcgttttatcaataaacttatattttgtatatggttcgaatctcttagtcaaatattgtgaaaaaaggaataaagaaatttcaatcattagatatacaactagatcatagtttagtagtcctaatcaatccgattcatcattaatgaggctgatggattcatactttatcaaaagaagcaaatcatataaaatttactaattacacatctttaattattcataattcattttctacatgggtgtttaattatgatcatctgatgataatcagaatttggctttcatgaccaattgaagtgaaaccctaatttttgttttcttttgatactgcaaaagcctattgattttaacacaagtaagaagacgatgaaaattacaatcatacccaaagagctccaacttggacaagcttaggaacaagttgaccacttaagtgaagagcgacaagggactcaagacctccgacgcactcacggccaatgaaaaccgccggcggaggaccaacgacggagacgccaccggaatattcatcttgtagagccgtgggaagagaggaaacctcgtgatcatcgagctcgatgacggtggggattacgccgatcgttgctaagagtctcttcatgacgtggcacatgcaacatgaagatctactgaagatgatcacaggatgctccgatatcagccgtcggatcttggcttccgttgattcctcttcgtcgatggaaagagaagtagatgaggtttgagaaggaggagtgaggtctaagcgaacgacgtcgtttgagaaacgttgtaagcctaattcttgcatcatagcaggcaattagagagagagagagaaacgtaaagagctttttcaagaagaagaggagattttgtatttgtatatatagaaagaatcaaaaagaagtttaaaacaaaagaaggaatcatagaggaaataaatacaagggccaataaaataagaagagaattattggggaaagaaaaagaaaaggacaaacaatggggaggagaagaagggagtggtgtatgtgcttgcttacatcacaaagtactgtctcgtgatgtgtttcttttgctttcgttttttttttttgtagtttagaaaatttatttattctgatgagttaaatgcatgggagttccaaacttccaatacccacgcgctagattttattgccgatgttgaccttttcaatagctaaagttaaaggaaaaagagtattcacaatttggagcataataggagttaggacgacgtcttactcgcatcatgtatggagaatacattttgtctaagagaagtaaagaatttatcttttacattagagtagatgtatttgaatacaaatgttcattaatttaaataattcaatttgtgttcttataaattactaacatatgcattagaggagatgtatttgaaagtattgcaattaccgaatgattttgttatttttcaaaaatttaccgacttgtatattgggtgcacaattgattgttttgcattagaggggagtagttgcgacttcttttgtaagagtaccgaataatgtaattaaaaggataaattttacaaagagagaaacaaaaaaatgtgactggccatttttaatatatcagaaagaataagaaaatgaaactagaatctttatttatttatttataatatttttttatttttagatttctctttatttgaggatttagttaattaatttttattattttattaggtttaactgtatttgagattatacttttttaagtgctacaaaatggtcattgcatattctttgagcttacacttttgctattatgacaaagcattaagcaaatatgttatcatgtgattatatgaaaatattaaagtaatggaccaattccaaggcttcttatattgagattctgttgctggcgattccgtcattacgtagcccagcctgagactactttgtcgccaagaaaactcccaaatttaggatatcaacatataaatatatgaacatataattaaggcgttcagaaaaattttagtccactttcgttttcaagtagaattacaccatttaagttctaaatgataagttctcctgaaaacaacaggacgagtgaataataatcacaaagagttacgaatccatttttttcatctaaaatgaataaactcatatggtcatggagtttaatagaaaaagttatctcatgggtgtggatggaagggtggttttgtccgcttgttccagtatattttgaaggatattttagcagatgtgtctcccattcaagtattcaacaatataaagtgtaaactcatgtgagcaattttagaaaaataataaccaaataaataaataaaagtaaggtagagggtaataacttaatgaactaaagaaatgcatggatcaaaatgcacaacaaatatatatgccgtataataaaggttgctgtttatttttaatgtttgaaataactaaaaaaaatctgaattatgttactagttaattacctttattctaagaatttattttttcagaaaatattggttgaagttatatcttcaccacactcaatatgatcaaagatcatcatttatttgttgttctctttgttctacaacatacaatattaatatttaaaaagtaacttaacattgataaatcagctagtgtgttcgaaaattcaagaaacgacaatggtttttattttatttttaaaccgacaataggttagtctcaaattcatcgaggttattgatcaaattgcttgatataacaaaagaaaataaataaaagtattgttgaatattatttggttaaaacaataagtaaaagtaccatgcacatactattcgagttttccactgatgagtaaaaatctaaggaaaaaaattataatatgatgtaaaaatgaagaagagcaattttggagaaaattaagtaaagacttcaaaacagagtaaggacaagcatgaagggtgtggaaataaacgaaatggagcccaatttgaaacggactttagagagatgtggttgtaggagtaccgtcgatggtgttgtcttcaacttcgtgtctgccacatgtgctcacgtaagcccatctttatttttaattgtaatgacaaaagtattagttaactagtttatttatgttttctcttttatcttaggtggatccattttcttttgttgtgatatctcttcgagtctttttttaatgtccaccatgatcatgacgtattctttttatattggtctcacctaaaacattatgtcctaagattctatatgtaagattccatttccatccatattcttataaaatacaataaaacgaatctttgtcaatgattcgaattgcgtttgagaaagatcgtatacttagctccatttacacctacccatagagttctccctaactggctaaataaatatgctagtgttattggttaagaggttgtaattacatattgtatatgtagatgcaagtcttaagtctagaaatttacatgtcttgctttgctttgaattttagaaaagcttcggtagaggagatttcaaaccaggatatcacacgggcattaatacagtatcaaatatgatatataccttacaatatatagagttgtttcaaaaagatgattttggaaacacgctaaaaccccaaacaatgatcatgattcaaaagaaagatataaggtatatactctgcatcagtttgaaatgtaaataaaattatcataatgttataagaaacaagaaaaataaaagaagagaagatgatctagactactaatttaagtgtatcgaaagagaagagagactggaagtaaggagcaaggacccaagtttggaagtaaggctctggcaaaagtttgatggtcagcgagaagcaaagtcttagtacgaggatcttatttgagtaacctttctttcaaatcccagtgatttgaattatttggcctcttacctttaattttaaatatagatagacgtcttattggttaataagacttagcataatcaagtcatatctaacaagagaatttatcaaaagaaaaattcaaaacaacaaaatgttgcaaattcgagaaatatacaaaaggaattaaagtagaaagagaaatggaggttagtttctcttctcttcttataacctcactctttcttggataacaagtttaaaaaatgtgttttaaattttaacactttacagccctagggcttgggattcccatgtatgccaagcgtggagacaccctcactttaggactaggccttggagatggaattggtccgtaagaattagctggtgaaaccctaggagacagactgacttgctccagtgcttgtgcttgtagctccattggataatctctaacacacccaattcttggaccatatccacttgtccatttacaagacagtctctttacaggatcaaacactggtctcgctctctcttctttctctgaaggtatctcaacttcttctgagacttccttcctttcttcttcttcatctgcagtcgatttgaatgacgaatattcctcattcacagaacatctctgcaattcagttcaacaacactcgtgaataaaaacattctcttgatgccaataacacaaatactaatctcataatatttatttccttaccttaacattggtgagatcaacattgtgctcctctaagaaacttatgaactccttgaagttgtcttctgttgggagataatgtccactatatggccatatagcctgaagaaacagaaggtaaatcagacattttagtttacataacatattaagagaagcaaagacaggtagtttcttattcaagtacctcaaggatcccatcgcgggcgactaaccttcctgctgcggttgtggcacctccagataagaaactagagtgctggaaaagacctttctttttaatccctacgtataagtttctagtagtactaagtacaaaaatcgacttggcttcctctgttgaattgatcagagtcatgccctgtttatacattagtctcccatcttctactatcacttcatatgcttctctctccatctgcaggtttcaaagaaacacagaggttaatgagtaatcaacaaggcagagctaactaattagtatagtcgagtcgaatcagataaaaaatcacaccggtcctaagtatctgatgcattgtttttgcagaacacttctagggtgtttctcaagatttacatctttgccgtctcctatatccaacctttagtttcaaatcagtgaaaacagagttttagaacacattcaaagacaggaagatcttaagatggattctggatttaagtccttaccagtaaaagaatggttgtgtgctcttgctcgctgaccagacatcataatagaagtgcaagttgtggccgtaacgatgacgtgggtcaatctgtaatttcaagagatggatcattagagtatattcaatgatagctttggatgtcaagtagggtacttgtctttgatatgaagttacaaagatatttaggttatggggacttacagcttcaagccaatgctgaagagctaatttctgagccttttcatctttagataagcctttcccaacctaagaaagtgagacccacgttggtttttcatatgaaagagagatattgagttctactaataacaccttgacttataagtaaacagagataaattgatgtcagaccttagcagctcgttttctagctcgtgcccatttcgaaacagcggtctcatgtttttcttctccaaagaaagacacagagctcaaatccaaagctgcaccttccaaagtcctccacctacaacatttcaagcaatacaaagggttagtgtaaacatctttaaaagacattaaaaaaaaagacgaagatgaatcaagtaactcaccagagctcctcaacaacgaccgcacaatctgctaagttccttctggtcctgtaactcttgtacaccttttgtaacgtagttgcagctgcatcaagctcggtgacaggtctaggagagaagaacacaaatggctctggtggagtaactgtaggtttcttgatttggattctctcacagtttcttccattcaaagtgttaggcgttgacttctttgtctccaagacctcaaaatctgaatcagtcttggtctctttaggaacctcccagctgttgaaactcaacgaccgctccatagtactcttaggagaattctggtgcctattagtatcgtctctcttgaaactgttggttcttgatgtcaagcctccgtctttaagtttgaagcataaggacccaacttcaagacccatgaccactaatataacgaaaggataattccaaagtatatttaatatagaaaatcccctgcacacattaattaaacaaacagtagtcgcattaaaattagctataccaaaccaattatttgtctcattcaaacattttaacaaataaaagtaccttgtgtgggtatcaaacacaaaacaaacgttccttggtgtttgtttagacaagaaacagagaagcttgaaagaataaagaataaaagaatgatttttgttctttggagataaaactgaactagggatatgaatataatgatgactaagagatcttaacataaatataagtaagggtaggcagttgaagactattgagagagtaagaagtcttcgtttttgcaaaattgttgaatatggaaaaaatattacggaatattcaaagttggcgtgtttgaattgttgaatattaccaaaagagacaaaatagtgagaggaggctaactaggagacagagtatgtggggagccataagagatggaggctaacgaaggtaagttcatggaagttattgagataaggacaattcacataatctttttccaacattaattttgtcgttcttatttaattatataaataactacatatttagtacacaataattttaaagggtttacgtattaattatctaacggtgaagtttaggtcacacaatggttcatgtagaattattacacacgatgacacgaatgtcaaaatttgcgaggagcataaacgttttacatttgaaaactttgtatgcacttgtgttgacaaattaaatcttcggcatgtagacatgtatggttgctataaaattatctgctatttcagagttactcaacgggtttacttttacatttgaaaacaaaattctctcaaatccttacacaaggtctatatccaagaagaggattatgaaagaattgaactagggtttaattcatcaaaaagtcaaacggttcaaagaaatacgtcaagttgtcaatttgcgaattgtccaatataaacatgtattttctatcttagaaatactaaaaatcaaatcgtgttatttcttttgtcaaaaacctgtctatcattaacgttcagacgcagttttatttgttccaaagtatagtttatgagactattgaatacattatcctacaaatggtcaaacataacatatacatttaaaattgtaaaagaatttctatttctactgaaattttatatctttaaagtttcaattgataattcaagtcatacaagttcacacgatagacaaaattttattttgttaaggagtgataagggttacttttgggttttatatgtcttcatcgatatgaacatgttcaactcgttttatttacatggaatatgtcgtacgtacgtccaaaatttatagaattgtagaaaataaacttccaaaattttaccattgactttcctcgaagctatagtagttctgaaattggagactttgaaagataaaagtacaaagattggagtaccactcaactctagctcgaagactttctttaatttctgatcttccacgtagtgatagagatgcatgggatgtttccaggaaatacttctacggttctattctaccaaatctggaaaaaaataaaatgaaaaacaaatcatcggaaatacttacagattttaagttaatgggctgggcttagattgttgaattgggcctcgtgctttatctataattaggctatttacgaaacccagccaatgaacctgagctgagactgagagacatctcggtgaagaagtagcagagatgtcgacggtgtacgtgctagagccgccgacaaagggaaaggtcattgtaaatactactcatggtccaatcgacgtcgagctttggcctaaggaagcgcccaaatccgtacggaacttcgttcaactatgcctcgagggttactttgacaacaccatcttccatcgtgtcattcccggttttctcgttcaaggcggcgatcccaccggctccggaaccggtaacttctacgctttctgattattcttagggtttaagacctctcatttgtatcaaattttcttctgattgctcgctggattaggtcaattgagttttatgtgtgatatatgtaacaggtggagatagtatatatggaggtgtctttgccgatgagttccattcaaggctgagatttagccaccgtgggattgttgccatggctaatgcgagctcacctaattctaatggaagtcagttctttttcactttggataagtgtgattggcttgataagaagcacactatctttggcaaggtaaagcaaaattacttcttttgttttgtttttctgcttcgtgcaattattcttttctagttcttgatcatatttagctgcaacttgtttttaattcttttaggtaacgggcgattcaatctacaatcttttaagactaggagaggttgacacgagtaaggatgatcgacctctggatcctgctccgaaaatattatctgtcgaggtgaaggattgttaatgcttgatctattatagtgttccatgtcttcatattgaggacattctctgattgatactgattctttggtgtgtcattcttgtgatttacttgatattttttgatactctgtatatttctgtgacaggttttgtggaacccttttgaagatattgttcctagagtgttagcaaagacatcagaagaatctgctgctgaaatcaaggaacccccaacaaagcccgtgaagtaagatgttatccatggtcgattgatagctttagctataattttgctttggctgttcttttgagacttttttgttgttgtctttgtgataattaggaaattgaatttactgtcattcggagaagaagctgaagaagaggaaaaggaactggctgttgtaaagcaaaagattaagagcagtcatgacgtattgaatgatcctcgacttttgaaggcagaagcttcagataaagagagggtaagaatacaatttatcttgtttgtggtgtgaactttcccatctttaatctcccctttttttcatgtgtgaaagtgtaggctaagctgtattaaaaaaactgaggcgacttattttatctgccatattgtggaatactagtggagagttcctcgtggttgctatatgtaatgatgcgtacagttctttaactttcttgctgtgtagtctgcctagcagtctatcagtgtgcattagatagttttttaactttatggttgtcgttctttattttaacaagcaatcttgactttctgatgtatttttatatttcagaacgcatctgagtccaaggaggtactatctgtgcgagaagctctgaatgctaagaaagaagcggctcaaaaagataaaagcttttctgtatctgatacagttggaaatagtgatgatgacgatgatggtgaagatgagactaaatttgatgcaaagatgaggaatcaagtgctcagcagaaggaaggagattggagatacgccttcaaagccgactcagaaaaaaagtaattacgttttccatctctctatatcctgatatcctgaaatattaaacttatggcaattcttgatttgaataatcaaatcttcaatcatattaagcaatcatgtctatgtttagggatgttatctgtttatcaacacgatttgatgcttttaggtttggcaccaagtattgccagaaataatatacagttctctcctcatgcgtgttctttacattatctctagttatgtctgtatattctaattataatatacttgtggttgttttcttaacagagagctctagcctgaaaggccgtgaagagtctacgcaaaggtaatgacacccacagttatacgctacgtctctgtatcatttgtcttccagtgtttgtggcttagtcaatatgtctgattcattgttccttagaatactattaatctattctagcaatatctcagtgcaaggcaagctcatactttgtgtgttcaaagttaggctaacagatacatacagcacagagaaagctataaacgcttttcagtgacctctccgtttgaaaaaaacaactatcaaatatgtcacggatgctctcatctgtacctaataacttattcttgatttatgatttagtaatagaacctttcagaaaaatctacttgctttttttgcatgaatgcttgaatatgttttgctttgattcatgatggtgtaaccagtgatgtaagtcattgactcattagttttgctattcacaggtctgatgctgtaagtagtgaagatgagaaaccaaggatggaaaagttgtccttgaagaaaaaaggaataggctcagaagccaaagccgaacatatggagaaaggagacactgatttacagctttacaacgcttctgaacgcgcccggcagttgcataagttgaaaaagcgcagactgcaaggaaatgaggattctgtaagttgtttaccaaatttgtggcttaattttaaatttattttctggcttattatatattccccttcttcgtttcctaaacttgtccttgctttattgtggcatacttattccctaaaagttaaatctaattttgtcagagcaactgtattactactcatctaattcgatactctttcagttgttacttgaactgatcatcgtttccctcctgcgttttcttcaggtgttagcaaaactcgagaagtttaagcagtctatctctgcaaaaccgtttacctcgagtaatgaaccagtagtgttgacctcgagtagtgaaccagttgacaataaagaagaagatctctctgattggaagaatgtaaagctcaagtttgctcctgagcgtggcaaggtaaatctctaaggttccatctcacttgagtgcggatctaatggattcattactacgttgttctgtttagttaacattaaaatcgaaaatccagtagttcataggatagtgcatgctaatcacaaatgatttcatcagaaggctgagctatgtttgtgtttatagtgtcctgtggaagaacctgacagtgtgaaactatcctgcaggataaaatgtcacgcagggatgatccagatgcgtatatggtggttgaccctcttcttgaaaagggaaaagagaagttcaacagaatgcaagccaaacaaaaacgaagggagcgagaatggtctggaaaatctcttgcctgagtttggaaatcttaaccatttaattttgttttcttatgttgatccttaagatgcccgttcactgtcaaaatctctcctgtttaaacttagatacattcagagacatgaatgagcatcttaaataaggtcactagctccaatgatacagaactaatgtgttaatacatgttatatgtaggaaacttagctatataagtgatatgattttaagcccttcaactgacatttatcttcaatagattggtcatccaggttggatggtattcttcactaggatatgtggttcaaaattctagcaaaacatggttagttcgattttttagcaagtttaaatgcaaaaaagatcatatgatattaaccaaattgatttagattgaaccatttggatttgttcaatctaatgaaactgcaaaaggagctttactttattccatgataaagcgtacatggaaagagatactaataagtttgaaacatgattaaacccaacggtcgaaaaatcaacacttatcagaaaatgtcactaaattggtaagaagcattgaagattctgtgttgcttcttctactgaggattgggaggacggctgttagcagcagagacgcgtgagccccactcaagcaactctttgctcgtatcatccttgtgaagaatcacttctatgaaacatagacaatctttcttctccgtcgtcgctgtcgtaatcgcctccactaactcctcttcgtatctcacctgtcaaacacaccaaattcatatgttagtttataaccaaagtctggctaaaactccattgtcatcaatctttttaattacctttgcagtccagcaattgccttcaccgttatgaatggcgtcaacgagaccagtgtagttccagttcttaatcacgttataaggaccgtcatgaatctctacttcaatggtgtagccaccattgttaatcaagaagatgatcgtcttctgtccattacgcagcattgttgatatgtcctgaaccgtgacttggaaactcccatcaccgatgaatgccaacactcgcttctctggtgatgcctgtgcgtatcctagagttgcaccaacagaccacccaatcgatccatactgcatctgaaactcgtacctacaatgaagaaagcaggttcaaatcttgtgcctacttcactataataagtgtaaagattagagtctctttttttttctggacacttacccacatccttttggcagctttagtttttggcaattgaaccaagaatcaccggtttcagcaatcacagcggtttcactagagagcatcttctgaatgtgctggaacattgtgttaactctcaatggctctcttgattcacacttcaatggcttaccttcagggacaaagatcctatggtagttctcatatgcagtctcgttacgcttcaccctcttagacaattccctgaagaaatcgctcatcaaaatgcaaccaaaagtaggaccattggccacagtgatacgatcaggttgcacaacgatggctttttctttcttgaggagaagcgagtaaccaacagagctatagtcgttgaagattggacctgcaaaaatgtaagcatccgcagattccacaatctcagagcaaaaaggagtgctcactgctccccaataagttccaatgaaatgaggatggtgctctggtacaaagcctttcgcagaaggcatcatcgccaaagcatagcctgaagcatcagctagctcaacaaaggcatcacaagctttagccacacgcaacttaggaccaccaaccataactggcttcacagccttattcagaaactccaatgttgcttccaccgcagcttctaaacccatcttgttgctcaatctgataaaaccatttgtgagttttaattctcgcagaaacagagtattgatcagagttcaagtataaattaccttggagctagagaaaaagggacaggatcacggctaaatgtatgatgaggaatcgctgctaagttacagcttacacttatatacacaggcttgctctctttcaaagctgttgatattgctttatcaatctgttcatgagcatcatctaaattgttcaccaccgcctgagaaacaaaaacagaaccaaaatcattcataatccgacgctaattaatcttcaaaatatttctaattagatctgattttttgtgattacctgataacaagtcaccgtttggaagcacctaagctcttggctaaaatcaggtaatccaatggtgtgatgaagaatccggttagtgccataatcgttagagttaggacctccgacgatacagataagaggaagattctcgctgtaagcaccagcgatcgcgtttaaaacgctgagtccaccaacggtgaaggtaacaacgcaagcgccgactccacgagatctagcgtaaccgtcggcagcgtaaccggcgtttagctcgttacaacatccgattaggttgaggtccggctcagccatgaggtgatcaagcaaagtgaggttgaaatctccgggaacagagaaaacatccgtaacgccggcttggacgagacgacgagctaagtgacggccgagagtcgcgtcgcagtagttgatggtgatagcggaggaaggaacagagttgtggattgttgcgacggtgccgtttgttggactacagacgtcgccgttcgtcggcttgcaatcatcgatcgatccgattttggtgtccatggaaatgggaaggtttgagttcactaacagagaaattaaaaaactgtcaagtttgtgtatgtgtgtgagagatatactctttttatttttgggatgagtaacaaaatgagaatgggagaggtttttatatagttgttggattagagactaggaggaatacatgggtggttttttgactagtggtttttggtttctgttttcttgtgcaaaaagcaaaaaaataatatctaactttgagatttgacccaaacattcttcttcttaattattgtttatgtcggtctaaaatgcatttactgttttagtatcatactactcccagtaaggctgtaacagattattaccattggaaatatcttaattttccaaaattgaacatcaatacatcagttatttttgtgattctcctcttaattatgaactaatttgttatacgtgggaacaaagttataatatccccattccaaatttgagttaatttcaggtttttagccggaaacaataatttgtatactcatcagttattattgagttaattctttgggttcacttttaaagtttcaatgaagaagtgtaattgctagcgtcaaacggcaagagacgtgatgccatttgcatttggtcagcaaactctattagaaaaacatattcggacgattatcgtcgttgagatgcagatggttttggggtttgcttcttatagtataatcagttaagtaagaaatatctacaaattttaaattcacttaatcgctttggttatatactaatcacacaaaagatacacgtagatctatgatggaatcttgtttttgtcgtcgtaactttcaagatcaatagtgatgttacggtaattatatgattaagctcacacatatatactgtcacacatacatatagtgtaattcaagggaaatagcttacaatgtttttttttctttttttcttttcatattgatatttcctagaaaactgtatatcaacatatcaataatttttcataatgtaattatacataaatttatgcaattttcttttttttgggtagcaatattaagtatttatgcaaaaattatttgactatgatcacttttattttttagttcttatagattgaatatatatatataaaatccaagcgtgcaataatagattttatagttttgaggattgaggttaaaatagtcatacccaaaaacttgtataaaagcaatataaacaaaagcttttactaaattaaatcatttatgtatataagggtaccttatttaaataaaaaaaattaaatcattcaaaataatatgagcagacctaaaatattggggccaccgtcattctaaaccgtctcattgtttgtttcataaaccaacggagtcgccggtaatctcctttgcaacttgatttctcaacaactaataattaattacttttcctaccttttggttaaacacatgaaattaattactatatcccaaaccactatgatcgtggttttaaagaacgtcgaaataggccacaaaagaccaaaaaaaaaaaaaaaaaaagtacgtcgaaataattgagctgtagcactttttgttttagtaaagctaatggtaagtgtttcaattggtcaattgattgtttttatatgacccgttgtgttgagtgttcttctacgtgacgagacaaaacagaaaataatattcttataagcttgaaattgaaatacggcgcatgttcaatactgagaggtgaaaacttatgtgctgcaacggtgatacacgtgaccttcatgcgtctcctagtatttcgtctacggccctaatggtgactcgtatgtcgtaacgttaacgtatccgattcgacgacgacgaccaagatttctttttcaatagaatatttaaatttgtacagaactgaagacgtttcgagaatcaaaatatatacttcaagaagtagcttgcaacacaataaagtgcgtcaaattttatttgttctgttccgaaagccccactttttcccagcgttcaggctatttggacattgggcctaatggccctagctagttaaatggctaggcaaattttcattatgaattagattttgaaatgttttataaggcttgatcatgatgagctttctgctacagaagtctcacattatcaatttcatttcttcgataagtggaaaactacataatgcatttggttgtcccgttgcatccagtttatatagcagtaggttttatagctaatttgggttataaaaaacggattgactttggcatagattgattagaaacaaggccgtttttgtagagatattcaagattcctatccaatcatgtaatcttcttccccataaaacattttcaatctttaatataagaaaacagttcatatggcataaaagtttgtaagtatacaatagacaatgtaaatcgaagacatatcgattaaaaacttaatgctatcatcattgtttgggcaaatttaatcggctgtaagatcttaatgctatcatcattgttcgaaataagcattgaataaattactgaatccctttgtagtttagtttccaaacgtttctgaaacgttttaatccctttataagggtgatttatcctacatcataggaaaaaatgctagacaattctagtaaatagtttgcaaaacccaaagatcaggccttacaatttgactaccatagacagaatacaactgatggattatagtccatatgccctaattatgatcataggcttgtattaactagaactcgagagatgaccatttttcagaagtcaaatgaatagttgagggaacctagctagttatatgtattcgtgtctgtgatatgtgattgggctgtcaaatctatgtctatatgtaacggttcaattcccacgattttttatgataaaatatgtgatagaaaaggatggcatgccttgctattaaaattgatgtttcatacttcaccgctggtgtcgtcaatggctctttgctaataaactactactaaaagaaaatcattgagctggcatttcttcaattgtcacgtaaaagacaacaacaacaaaacaccaaagcaatatttttttctctattctattttcttaagctcattttcttttatttttaaagagattcctttctcaaaattgtaccgtatacattacagctaacacgcaatcgatcatatttaaatttgagtactaattctaggctagctacagcatgataacaactaaaaaaactcaactatggtattgagtgttatggttcgatttcgtatactatttattttactgtaatcgaaaatttaatagataattatgtgttcggagttaggacccataacaagaatttacatagataatcatcatcatcgtttgcttaatgctacgttttttttacattatttgcttggctaattatgctcttgacacgttgttttagcttaacattgaattcttacgaatatatgttgaaaaaagtttttatgtggtgggtcagcactcagcagcttagatatatatgcaatcactttgtgcatcatgctatgtagattagctaactctcggcagcaattcatgtaaaagtaaaatacgagtgattggtacattaaaaacttcaccatcctcttgcccaatgttggatttctgcttagtcctcaaatcagttgttggatatccagtatccacatttgagtgccatgtttctgcttaattagtcctcgaattattttattgattttgatgttacacaatatttttaaaaatgaggaaaaatacaaatttcaaaaaatatctgatataacctggtttctcttttctttaatgtttcatggttgtttgtttattgcctttacagagaataaaccaaagagtttattcctgcaaataattaacgttagttgtgttatacacattcatatgaatagtgaatcttctgcagtcgcatgtgtaacattcaattgcgcaacaaaggtacaaaagcccacttgccctttttaatctcttttgaattttgatcgaccctggattttgatgaactaaattcctaaaaccatttgtgtttaataaataattttctgaaaatatatcagccattgacgtagtgacacgtgtaagtgtggaaattggacaaaacactttttaacttttttttgatgtttgtgaatttcattgtctctaattatgattacaacgcagcattctgacggtttgctccctcttacagctagaccaccactaccttttcctaaacgaaaaaaaagagattacatttttcattttaaaaaaaaaatttcctctgattcatataaccaaaaaaagaaaaacataaaaaacgtctctacctaattttattcctaataaatgacctgaaatgcaatagctttttaaaggctatgattggtcaaacgataacggttgacattttacgttctatgatttcttgagtggttggtaatggactaatggtatatgtatcatcaggtattgagtatatctctatatatatgcatcttcatacctgcatagcattgcagaaaatgatactaaataaaactattagcataattttaagcaaaaatttaagccttattcacaccatcattttactttgagactccaaatgattcattaaactcaaactccttttttttttgtcttgagtgtacaagtttagcaaaaaacaaacaaacttaaactcatctaatatcctatgtttttggagagttaatgaaattctaccaaattttatatgagataacatttacacaaaaagtacaatataggaatatatagtagaaaatccagataccatagtttaagatataattaaaaaggataattttcttgtcaaaaaacagaaggcatatataagctggatattaatatactaactatcatcacacccaacgaatcctatgcgcgtgtgaaacccacgatccaatcacgaagctaaattcttcagcttcgttgtataataaattgttaatcacgaccgtcatattcctattataccctttgacagcgacacactctctctccaaccaaacatatctggaaactacaaccacgcgcactcataagcgcgtgagacttctatttttctcttttattcactgacaataatcgttacaactttatctgcttatcaaataaaagctaaataataataaaaatatttttatatctgaatacttcccaaatacagagaagccatttcaacagaaaatcgacacgtgtccatcagaggttcgtcttctgagggtaaaattgtaaactcacgttgtctccttcatcatctctctcttttaagaatttccagagcgagagagtgagaaagagagagagggagaggtgcttttttagtcgttctcgtcgagagacttatttatacacgaaaaaggaagaagaagactgttgaaagcgagagagagagagagagagagagagagagagagagagagagagagatggaggatatacaggaggaagagaacggtacggacgaggaggttctgggatcgagcttgaccatggagaaagtggccgcagcgaagcagtacatcgagaatcactacaaagctcagaacaagaacattcaagagaggaaagagaggtaccaatctcgcttcttcttcttctttctttcactaagagagatttgagatttagaattttgttttgatttcgagacattgtttagggtttaattagttgtttgagcttgattctctcttaatctctttcctgcgaatcgtttagttttctctttgatgataagcttgcgttggttacttccttgtactgtgaacgttttagtcatttgtggctatggaagagctcagttctgtatttaaccaacattgtttgatttgttatagacggtggatcttagaaagaaagttggcgtcttctggagtgccaaaagaggagcaaatcaacatgattaaagacctggagagaaaagagacagagtttatgaggcttaaaaggaacaagattagtgtcgatgactttgagcttttgactatcattggaagaggtgcttttggtgaggtttgtacaacagattactacctctcccttttattctcacttattcttgcagctcgagcatttacaactttaccgagattggtttctgggtcctttcttaatgagtatggtacttttaatcttagaaataacttaatcttatttacaggttcgcttatgtcgggagagaaagtctggaaatatttatgccatgaagaagttaaagaaatctgaaatggtcatgagaggacaggtaaaattcgtaaacaattggaatgatgtgccacagctaaaactgattatatttatgcttgtctctgagtttacctacatgtctgtttcttctagtataatatgactaaaatgagtgtacattttgcaggttgagcatgtcagagcagagaggaacctgctggctgaggttgaaagccattatattgtgaagctttactattcatttcaggatcccgagtatctgtatctgattatggaatatctccccggtggtgatatgatgaccttgctcatgagggaggacacattacgggaagatgttgccagattttatattgctcaaagtgtcctggccattgaatccatacacagatacaactatattcataggtggcttttggaacttgcatgcttctggtgtaaactgtgatatttacatacaatttgattgacgttctgtcttctcacttttgcagggatatcaaacctgataacctacttttggacaaagatgggcacatgaaactctcggactttgggctctgtaagcctcttgattgtagaaatttaccttcaattcaggagaatagggccacggatgatgaaactatgtcagaacctatggatgttgatagatgctttcctgacactgataacaagagaagctggcgcagtccccaggaacaacttcagcattggcagatgaatcgcagaaaactagtatgttaatcttttgttggcgtatataaaattctcctctccccttcttttgtagctttatctccatttctctgatccctttatataccaaatgtgactggagcatgtagatagataaatcaaaaaggggaataatgaaaaccaaacatggtattcttcatattgtaggggagcggagaacacttttcaattatcacctgtactgtctgtttattaatttgtgtggcaagttggcgacaactgatgatagtgctctctgattggtttctcattttttgaaaggcattttcaactgtgggaacaccggactatattgctcctgaagttttgctgaagaaaggatatggcatggaatgtgattggttagtctttttcttgaacgtttatcatgtttagaatgaactataaccatggtgcatggtattttactctgttgatagtgctttagctatttcaatctctctgctagcaaccatttctacagcttgataaaaatctttcatttgtcattatgcaattgttccatagcctcctgagctgtttatttgcctttgaaatcttgtttttgtctctcaggtggtcattaggtgcaattatgtacgaaatgctcgttgggtatcctcctttttatgctgatgaccctatatcaacttgcagaaaggtataaaatcttgcttttatgttcactatcctagtgagtttactgtgtagtataaaacagtgtgagcaatttgactggcgtcctatggaactgaatatgactgtttgtatacaaaagtgttagtcacatggtaggaccataggagagtgttcaattctgtgaccaaattttggattataagggtgtcaagttatgtagaaaggccacaattttgccagtttatgcgcgtccaagttaggaaaatgttataatattatgtccagtcttttcatataaatttgacaactatgctttgatatgtgggtaaaatttccattgtcaattccttttgtttgttctttgtggatgcataaaagaaaaacaagagattttgtttataagattcactgatcatgttcatgaagtcttaattccttctgctagatcgtccattggagaaaccatttgaaatttcctgaggatgcgaagttttcatctgaggcaaaagatcttatctgcaggttgctgtgcaacgttgaccataggcttggtactggaggaggagcccagcaaatcaaggtaaggatgctccatgagaagatttagtagtatttaagataacctttgtcatttttctttgttaacttgtaccttaaatttgcatcaggatcatccttggttcaaggatgttgtgtgggaaaagctctatgaaatggaggctgcgtacaaaccagaagtgaacgacgagctagatacacaaaattttatgaagtttgatgaagtatgccgtaaattcttctttttaatttatcatgctttatttagaaaatgttctctgaaaaaatagacctcccttataatactttaagatttatcgtaaattataccagtatcaaggtcaacatatattagattttccaaaattcattttaatgtgtgtggtttatatcttgctgtgaattgtactggttatcccgcacccttagtttctgatatgccactggtgatgatggtgatacctatctgccttatattctgttggtcagtattttgcagaaatttatattgataaaggtcaaccactcactgatccttattagggtcttagagtaataatt

SEQ ID NO: 661 - DNA, 111876 bp, Arabidopsis thaliana
gaattcatccatgcactcagtgtctttcatccctatgcatcaatccaggagaagaccgattgtaaggatcaatattactactaatataactccttggatgatctcaagcatatgcttttattatctgtgacagttgcatttaggctctatgatctaagacaaactggattcattgagcgagaagaggtaaataataatctgccattgcaagttgcaacccttcttttcagcttcataataagttggacttgttaggtgcaacaaatggtttctgctattctcttggaatctgatatgatgctatccgatgaacttctgaccatgattattgataaagtgagttcttgaaatcccatctctcttagtgtgatgtataatattttggtaaatttagttagcacatgcttcttttctttctctactttgtttttgctagacatttgctgatgcagattctgacaaagacggtaaaattagtaaggatgaatggaatgtctatgtgcataaacatcctagcttgttgaagaatatgactcttccttacctaaagtaccaaatcctctctcttttttagattagcccttccatttaggatttcctttactttatcatcaaccatatctgtatttgaatttgaagggatgtgacgacagcattcccaagttttatattcaacactgaggttgaagactgaggcacaactgtccatgcaacaccggtcatcttttttctgcttggtcctgtaattcgagtgagattgtcatagcgcaagagcagaacgaggaaagaaggttttccttattttattttaagccaacgtagttgatgattattagctgtaagtaaaattgtcaagcactttgctttgttttgatgactttactgtaattgttccattgaaagtaatgaagcatttttcttttcatcttgcgtctatggcagtatagttgatttaagtcttgattctaccaaagtttgtgttttgttttcggtcaattgtggaatatataatttatagaagatgtattcgaatgaaataatagagtaagagacagaaagcgtataatgagaacactatggacagaatgtgaaagagaagagtgcgtggtgagagaaagggacacaacacaatgggacagagcagtaatcaagcagacactgcagctgcgacttgttcttcctctgggaggagagtgcacaccagtttcctgtctccatatacattgtccacacgccctgttccacatttcaatcatttgtcacatatcagaattccgaaaccagaataaactgaatcgaaaaccaaatgtgcaatctatatcttggatggtctaatacctgtggtgggccagaacttggaggagcggagccaaggcgcagggaaagcagcatactctcgagaatacggctttttccatgtgtctgccattagcaacgatgggggatgtggagctccctgagaaaacaaacaaccaccaacgtatgaatctcaacttctccgaacaatattattattggatataattatgataagtctttgttttcctaattaccttgagaacgttgttctggacatctgcatttcctttttcaatctgtgcaatttcttccctgattgaaatgagagcatcgcagaacctgtctagctccgcctgcaaacgaatattatttagtttcatcaagttgatacactgagagaagaaagagtcaatgagagatctgcatatatccatatttaccttgctttcactctcggttggctcaatcataagagttccagggacaggccaagacattgtgggtccatggaatccatagtccattagccgtttcgccacatcctctggttctattccagcagtgttctacaaattcatatttgaatcggtcagtgatatgcatacccaaaacaactactttaatttcagttcacaacattttcataccttgaagcctctcaagtctatgatgaattcgtgtgctactgttccgttaacaccacggaaaagaactgggtagtgtttctgtaaaaacaaatcaagaggaaaattagactcctttcattctcaaaagatgaataggtaaatagaagacaaagatgttctactacctctaggcgctttgccatgtaattggcattcaaaattgcaatcttagaggcatcagtgagcccaccagatcccatcatggcaatgtaagtataagatataggcaagataagcgcagatccccatggtgcagcggatattgcacccaaaggtgctgtcttctcgggttgtgggataccaccagtcggtatctgtatacatggaaatggaagaaacaaaaaattaaggaattaatcatcaatcaccaagaaacataaaagtgatgaaggataaaagactaaccacggggtgagaaggaagaaatggtgccaaatgattcttcacaccaatgggacccataccaggaccaccacctccatgaggaatacagaaggtcttgtggagattgagatggcacacatccgctccaataaaaccagggctcgtcaaaccaacctacacgtacccaacaccatgctcttacaaattagagaaaattcaagatctctgtgttctgttttagtaagatatttcacctgtgcattcatgttggcaccatccatgtacacttgacctccattttcgtgtattatgttgcaaatctcgtcgatgccctcttcatagactccatgagttgaagggtatgtaaccataagagcagctaagttgtctttgttggcttctgcagcttttctcacctcctcaatgttaatgtttcccttagcatcagttccaactgtaataattttcatcccgcacatagcagcacttgcagggtttgtaccgtgtgcagagacaggtatgatacacacattacggtgatgatctcctcttgactgaaaaatgcattcattcattcacttttcagcttaatacaattgaatagaagattgttaggtagaataagatccaaatttaggataaaagatgttaccatgtgatatgcgcggataaccataagcccggcatactcaccagcagcaccagcattaggttgcaacgagaaagagtcaaacccagtgatcgtacacaagaggtcacccaaattttcgaacatttcctacatacatgtggacaagatatcagttcattgttcaactttctaaatcagacctcagatgaatcaagaaagtcactaacctgataaccttgtgcttgttcaacaggagcaaaagggtgaatgtcagtgaaacttggccatgtgactggcatcatttcagttgttgcatttagtttcatcgtacaagatcccaacggaatcatgctgtggcacagtgatagatcctttgactgtaacttgtggatgtacctaagcaactcatgctctgtgtggtacctaatcatattatcaaaatggaaaacaaaaatgagatactgccaatccacaagtaataagccactcaagattcaaagaacagaataatacatgttgaagattgggtgggtaagataaggactctctcttgttaggctagaaggaatggaattctgaacctcgggtgctagagattcagccgtaaatggaacctgaagcgaattgagatagtcaaatttcatgcaaggatcctagaaatgatatatcaataacaaaaagaggtatgaacaacactcacaggcttgccagaagcaaaaactttgaaaagtttatcgacatcatccaaggtggttgtttcgtcaaaggaagcagtaatctgaattaagtaatcatatccaaatattcaaatctgtatgatgctatgagagtaaaaaccttgaaaggccaaagcaaaggagactcacagtggttgagtccacaacacgcagattaatttcacttttggaagctgcatcagcaattgcatgtgcatccgaacacttaattttaacagtgtcaaagaaaggaagttcttgaacttctgcaaccccaagcttgttcaaccctaaggaaaatataccagcgagaccatggacacgctgggcaatagattttagacctgcaggtccatggtaaacagcatacatggcagccatgttggcaagcaacgcctgcaggaaaatgaaaagatgaagtactcatcaacatgaatcaacatatcatctagttatctgaacgaactaatagtgaaaagtgaaaaatgagtaatcagatactaagaagtaattacttgagcagtacagatgttgctagtggctttgtccctcctaatatgctgttctctagtctgcatagccatacgcagagcttgctttcctgaagaatcaacactaataccaataatcctcccaggcatcattctcttatactcttgtgaagtagccaagaacgcagcatgaggaccaccataacccatcggaacaccaaacctttgagcagagccaacaacaatatccgccccaaattctccaggaggtttcaacacagtcaaagccagcaaatccgtagccatcacaaccttaacaccattagcatgagcattcttaacaaactcagcataatccaagacttcaccttcagtaccaggatactgaacaagaaccccacaaacatcaccagagctgtaatctatatccttaagatcagaggtgacaactttcaaatcaaacccatcagctctagtcttacaaacatcaatagtctgagggtgacagttactagcaatgacaaaggtcttctttttacccttaagaatgttgttacacatggccattgcctccgcagcagcagtgccttcatccagaagcgacgcattggacataggaagacccgtgagatctgtgatcacggtctggaaattgaggagcgattcgagacgaccttgagagatctcagcttgataaggagtgtattgagtgtaccaagctggattctccatgatgttacggagaatgacagtagggacatgagtgttgtagtaacccatcccgatgaaggatttgaaaaccttgttcttggaagctaaatcaaccatgtgttgaatcatttggctctcggttaaaccagcgtcgaatttggagaacttcatggaatctaatcgaatcgatttgggcaccgtagcatcgatgagtgaatcgatatggtcaaagccacagaatttagccatgtgggtttgttcgtctggtgttgcagagttgtgacgacgagggaaagtatcgctgggtttaacagcatcgacggagatggaacgcgtctgctggtgcctcccgaaagccgccgtgtggttgacagatcgaggggtggagatgaaaggggaaagggaagagacatacctcgccggagcgtgaggaacaaggtgaggtgtttcagcgttacggtgtcgttttgtgtcgttaacgagacgtttgacgattcctctgtaagcaagtctccttgcgcgctccattgggaaaaaaggttgcagtcagaaaacgaagagagtaagagagatgttttgagaaagatggatgtcttttttagtttttcgccatgaatgaaaggaggaggtagaagctagctacaaggagggaatctgagagagagtatatacaatatacactcacggaccgttgaatataaaatgtgtatattcacgtcccaagaaatagttagtttataaatacagagaaatttttgggaaataaataaaaatcctcaaatttcgtggtgtaggctcggatgtggttggtgaaaagttgcagattccacgtgtatcgcatctaaatcagtagtgcaatattgtgctaatcattttatttttatgattaaattggatctccgacatctcttaattatttgtttattagtagcagtttctccaaactatttacattttttcacaacaatatacaatattttttattgagtactaactattgtgattttaaaagtaggattatttagtgtctttagttcgcaaatttcttattttcctacaaaaactgtagttcccctctaatgggacatacgtaaattgtaaagtttaatcaatgttaagtttttttggttctgatttacatatccaacaaaaaagtacgaaaaaatagaatttatgcaccaaatccttgagataatttacaggaattgtgggatatgctgtaaaagcacgagataaaatttgaaaggaagggaactgaagtggaagagattgggtatcagtggacaaaaatgtttgtcacctttatcactcagaaagataacaacaaataaatatatatatggcaaacaaattttaattattttggttcacatgaaaatatatgataaattaggtggcggaatgcgtttcacagagagtttatctccacaaagaaaattttaattaaacagataaatatagggttcgtctttttcttcatcatgcatgggaaccatcgtcatccatatatatatatattcgacagaaaatgaaatattatagttttcgaccttccaagaataatatatcttaaagatcgtggaaaagattactcatgagtcatgacctactctttttaaaaacacttagttcatatatatggttctattatggcgtttcttgagctaaatcaaaatgaaggattagaatatgctcgaaaaggcgtcaagaaaatctttggatttcagttgcatacttgcttgtaaaaactaattgtatttgtttttgttttttgttcaaaaattaattatttgtttaccagctacaaaaatatataacatgattgataaagagtgaatatctaatagaattgattacaaacattattttgaaacaaatagagtgataggcatacctataataattctgtccaaaagaaaaaagaaaaaggcatgcctaaatttattactttcataaacaaatagtaataatgaaaagtgatcaagcccaaattgcaagagcagacatcatcccagctccaagaaacaaaaagcaataagaaacaacttgaactctgaaatcaacactcatcttcttgctcaagaaatccgcagcgatcaaatccacaagcgccatgtacacaagtatccccgcagagagagaatcgagcactccttcagccaccaatgctgcaacgctataagagttgtaagatgaggcaatggccgttcccaccgctacaccgatcggagtagtgatggcgaagaagaaagccatcatggcagatccacgcggggttagtctggcctctgcgacgcagccaccgagggcaaaaccttcgaagaattggtggaaggaaagagcgagaaggagaggacgtatggtgcatgggctatgtgatactccaagcgatattcctatgattattgaatgtgacactattcccatttcaagtatctgaatacaaaaatataagggtatcatcaattgattttgtgcatcgacactatacaaggaaattatataaacggattggtttgactaagtcacataacgtcaaaatatattaacacacacacacacaccaaaaaaaaaaaatgtttccacaatgcgtttaagtcgtcatttgtatctttggaagaaaacttaaataatagtatgatattttagaattatcttattttttcgttttcatattaataatgttttggtagaatgaacatgaagtagtactatatataatagttacgaagataacattaaataattacttaaacaagcaataaaataaattttattatttttttcaataacaaaatctatatagtgattagcaactaactaaacttggcattgtaaaactttatagttgattactataacaactctaaaacagcttatgcaagtcatgtacagttattagaattcatccaattgacttggctacattgtatatgaatgaagtcaactgcatttgaaataaataaatcttattagcattaaagaactcaaaacttaaaagtcagagcttacgaaaaacaaagtcaaagtcaaaaaacatatgaagaaaagaaaaaggtcgtttacctgagaaacaacaacgtgcctcacaccactgtccaagcctacgtccccgtggccgtggctgtggccgtgtccatgaccggaaacaccacttctcttagagagagcctcaaaaccttcggcacccatggagaggctatgacggtgatgctccgcgtgagcccgcatccccacgatatgcaacgcccctccatcttcttgatctctcagaaaacccgattcaagacctgggtcagacataaccgaaacttgcgtaccaagcgactcgacggactggttcatcatcttctcctgtttcctctcgtagtatcccgtgatcatgaaatccgcgagcagagtaagaagcgccgcgaccatggcgaagaattctggaaaagggaacattttccatggaaactccggcagacatgggtcggacaaagctttggatccgcccgagagcatgtgaacgaaccctgttgcgaggataactcctgctgcgaacgctttggctcccctcattaagccaccgtttaacggaagtagggttccaactagaggaatcgagactccggcagctccggagataaggatcgacgccatagctgcgaacttgagggtaagagcagctgcgtcatctcggcacgggtctgagtcgcccgagtcacagctagttgtgaacgactctgttttgttacatgcaaaaataaattgagttaactttgctaagaaaatctcaaaatttgcatttaagtgtgtttaagagcgaaatgaagtaattgctttgagatttgaagtgacaatacctgtcaaaccagatgataatggtcgaagaaactgccaaaaatcctgaaaacattatgaggcaaaattatgtgaggaaacaggattgaagaagcaaaataacattaaatagatgaagtggaagaagtttcagacctgtaagagagacatttactaaatccgattaggcgattaaacttgtagaattatataaattattgccaaggaaaccagcaagctaagtatatatgggttattaatattatggagttgtctgtgtgttttataaagaaagattgggagaatgtcaatcagtgcgagggtttgtgtgtgcgtgcacgtacgttaacaaggtcacatgaggttcacgggaatcaaatgaccatagaatgtcgtcattttcatctagtaccctcattgacaagaatattaaagtttggaagataataactacgagaaaacaaatatagaattagagatgagatgtatgagaatgttttgttataattgaagtctttgttcgtatcttgcatcagaagtatgactcttgtttggtcaacttgcagaaaaatgactattacaatgcgaaatactagtaatgttttgcgtcttaataaaatttcattcaaaagattatgtaagttaggtttgcattttacagttgattttgtttttctcctatctcatgattctctgttttaataattaaaagttaaaatttagaaaatagccacaaacatattcaaaaagtatatatttgggccaaccggcccagtaagggaagaatgttccttaagttgcctaaatgagcgactgagaaactggcccacaaaggccggacctgtatcattcacaaccggaaaactttaaaactaataaaccaacgttcttaaaaaagcgacactttgggccataatttgttgggaagggaataagtaagaatatgctttgggcatatctgatgatttatatctgtctcatctcatctctcatcgttccgggagaagagaagagagacccatccctcacttcaaagttcaaagtctcgaaggatcttctccaactctctctaaacaagattccaaattttcaaaggtaagcaatcgtttcttctaatgaatttcatttctccggttttgtaagttgagtgatttcgttttgaagaaactctgaatatgataggaaatcaaaattcacagagttttcattcagttgggttttctctgaatttcatcaatgtacttctttcttacatttactttagttgatcaaataaatatccagtctttgacaatagctgattttcagattcgataaaagacttcaaatttcgtgtgttttgattcttctcttgttatggacgtagctgatttaggggggggggtgtgaagataaagtttcgatttctattcatgtctttttggattttgatttgaatttgaagttaaactagagaaaatcagctgaatccttacttgttatatggtatgaaacatctacttgatatgtcttgttctgctgaaccaaattatgtcttgaaatcttagctgcttttgtttttgcaggtgaatttgtttgatagaatcaagaacaaacctttaaaatggcgcatctactttcagcttcatgcccttcagttatctcacttagcagcagcagcagcaagaattcagttaagccgtttgtttcagggcagaccttcttcaatgctcagcttctttcaagatcttctctcaaaggacttctcttccaagagaagaaaccgagaaaaagctgcgttttcagagcaactgctgtacctataacccaacaagcaccacccgaaacatctaccaataactcatcctctaaaccaaagcgtgttatggtcattggtggagatggttattgcggttgggctactgctctccacttgtccaagaagaattacgaagtttgcattgttgacaaccttgtaagacgtcttttcgaccaccagcttggacttgagtcattgactcctattgcctccattcatgaccgaatcagccgatggaaggctttgacagggaaatcaattgagttgtacgttggtgatatctgtgatttcgaattcttagctgagtctttcaagtcttttgagccggattcagttgtccactttggggaacagagatccgctccttactcgatgattgaccggtccagagcagtttatacacagcacaacaatgtgattgggactctcaacgttctctttgctataaaagagtttggagaggagtgtcatcttgtaaaacttgggacgatgggtgagtatggaactccaaatattgacatcgaggaaggttatataaccataacccacaacggtagaactgacactttgccataccccaagcaagctagctccttttatcatcttagcaaagttcatgattcgcacaacattgcttttacttgcaaggcttggggtattagagccactgatctcaaccaaggagttgtttatggagtgaagactgatgagacagagatgcatgaggaactccgtaaccgactggattacgatgctgtgtttggtacagcacttaaccggttctgtgtgcaagctgctgttggtcacccacttacagtttatggtaaaggtggtcaggtaaatgactttcttgatctgttttcacatgaaatttcaatcgaaaaatttgaggttttgattgaagtttttccctttgcagacgagaggctacctcgatataagagacacggttcaatgtgttgagatcgctatagcaaacccggcaaaagctggtgagttccgggtcttcaaccaatttacagaacagttttcagtcaatgaactggcttcactcgtcactaaagcgggttcaaagcttgggctagacgtgaaaaagatgacggtgcctaacccgagagtggaggcagaagaacattactacaacgcaaagcacactaagctgatggaacttggacttgagcctcactatctatctgactcacttcttgattcgttgctcaactttgctgttcagtttaaagatcgtgtggacacgaaacaaatcatgcctagtgtttcctggaagaagattggcgtcaagactaagtccatgaccacataaagtgcagaccaatattacacataaggagagattatgaaagagatgatgtgttgtttggtatcttcaaacttcatttctgcaaaagacttgctaggcttaagaggttttgtccatattacattgtgcaggttctttaatgttagatcttaatttcgatgaaaatgttataatgttgccttaaatgttatgtaatgagaaaaactatattatatgaaaaataagaaaatgttaaataagtaacagaaaaccatcttttacttcagttaagagaatctgacgaatatcgatcaatggttgcagaaaaatttcttcgagatcttagacgaataaaactgtaattaaatttcttcaataaaatctggtttaaaatttatataagttacgtaatacttttggtgtattaaatttaaaataatggagagtggtgttggtgggtcatcgtcgttggctatttttaaaaaatattaatgtcttttccaaatacgaaggaaacttgtggggtcaaactctaaggaatagagtgggttttgtataattataattgtagccctaatgattctctcgttttttcgtatactatttttctaaagaacaataaacgattcgattactactatagttataaaaaaaaagaaacagcttacacatattttcactttccccatttattttgtttgacgaaaaccacataaccaaaagtaagtcgatatcccaattggccaattcccatttattttttaattgaagaaaaatatgcaatatgattttattttttttccgtcaaaatatgcaatatgattatatgaataaactgcactctatctggactctgtgttccgcttacgtacgtctatgattttttttgcgtgcttttctttgaaactatcaaatgaatccttagtggccgagctgccaccatatctcagagttacacgtaaaagcgtattgggaaaatttaatattcatgttgtgcgcctcttaacacatttgtatctacgattttgtctctgttgtttttgcagcatatccgaaaatagcaccaatgaggaaaagtgagagagcttgctgtccaaaaagtgtatatatttttattcaatttttttaatgctacttacaaatgatattgaaaaataaaagaaactagatataaataataaaacaagtggatggaatgatcaaataattgaacaaacaattctccatagttaacacttaacactattcaacttaactgaaattaatagtttgaaagcgtggaggcttttggtgtggaggcactgagagttttctttgcattttattgcaaatattaatatcattatttactaaacatttgttggagagattgttggttatgattgatgagctcatcatcctcggcctccatcagtattcatcaacttgcgaattaaaaatatatacaaaatagcataaccttaatttcgaagacatgtcacatgatctcacacaaaattcttaatcccacaaactaccaccaagttgtatataggtcggcaagtttttttcttttttcaagttaatttcggatgtatgaacgtatgtgcatacactttacagtatggttttgaaacttgaatatcaaaaatttatctatggaaattactccttagcaaatgatatctgagtaacaaagaataatagtattttgtaacacgcacaaaaatatgaactagtggaatatattaaaaacgatgtctccgttacttcgcctatactgaaactcgtttgagttttaacaaattaaaggtaaaaaatatattacgcttcgcacatgcaaaaaataaaaatgactgcatccagatcatccgaagctctctcggtaaactagcactttagtgtgagatcagcacctaacatttatttgacataggtcaaccttgacccttgaaatgtggaacttggacttttgacctcattttcctcaacctactagaaaaatcgaccggtataaagaagctacatatagcattctattccaattaccaactcgaaagaagaagaagaaaaaagagaaattcttggtcttttctgaatctttgaaaaagaaaatcaataattgtggggaggacaaaaaaagagggtttgtttttggagatgccacttaagcccagcgtcgctgtcaaaaccccctcaattattgaaagtgggtcttctgattcattcatttccaaaacccttatgaatttataaccaaataattcaaaaatgtatatacaattccacaactaacctttttctcaaacaagatacgtttgtttaattaagggaaagattaagacatggaaatttcactgaaacttctaatgcataaacactaccgacttcgtacctaaacgggatcaagaaacaatcacgaaatcgtctgacgacttaggatagtcatctccattttttgagaaagatttagcttttggtattttcaattataccgacgtttatatttgttttttgtttttctaaatagagaatatttccttgaataggaaattaacgtgatgccgagagcttggagaccttacaaataatagtagaatcttcttccctcgttttctctactttatttttcaggaatattaaagaaagaaactttgaaattatcgacaaatcgtattcatatcatcatcagattataaaagatttctaatttaccaaagaaataattactcataagtccgattaaaatcacaactactcagacgaattatatatatccagatcctatatatcagaagaaaagaaaagaaaaacaattaccaattcaagtaaaaggtttctgagctaaattgttagatcgttaggtataaacatcttgcgttttatcaataaacttatattttgtatatggttcgaatctcttagtcaaatattgtgaaaaaaggaataaagaaatttcaatcattagatatacaactagatcatagtttagtagtcctaatcaatccgattcatcattaatgaggctgatggattcatactttatcaaaagaagcaaatcatataaaatttactaattacacatctttaattattcataattcattttctacatgggtgtttaattatgatcatctgatgataatcagaatttggctttcatgaccaattgaagtgaaaccctaatttttgttttcttttgatactgcaaaagcctattgattttaacacaagtaagaagacgatgaaaattacaatcatacccaaagagctccaacttggacaagcttaggaacaagttgaccacttaagtgaagagcgacaagggactcaagacctccgacgcactcacggccaatgaaaaccgccggcggaggaccaacgacggagacgccaccggaatattcatcttgtagagccgtgggaagagaggaaacctcgtgatcatcgagctcgatgacggtggggattacgccgatcgttgctaagagtctcttcatgacgtggcacatgcaacatgaagatctactgaagatgatcacaggatgctccgatatcagccgtcggatcttggcttccgttgattcctcttcgtcgatggaaagagaagtagatgaggtttgagaaggaggagtgaggtctaagcgaacgacgtcgtttgagaaacgttgtaagcctaattcttgcatcatagcaggcaattagagagagagagagaaacgtaaagagctttttcaagaagaagaggagattttgtatttgtatatatagaaagaatcaaaaagaagtttaaaacaaaagaaggaatcatagaggaaataaatacaagggccaataaaataagaagagaattattggggaaagaaaaagaaaaggacaaacaatggggaggagaagaagggagtggtgtatgtgcttgcttacatcacaaagtactgtctcgtgatgtgtttcttttgctttcgttttttttttttgtagtttagaaaatttatttattctgatgagttaaatgcatgggagttccaaacttccaatacccacgcgctagattttattgccgatgttgaccttttcaatagctaaagttaaaggaaaaagagtattcacaatttggagcataataggagttaggacgacgtcttactcgcatcatgtatggagaatacattttgtctaagagaagtaaagaatttatcttttacattagagtagatgtatttgaatacaaatgttcattaatttaaataattcaatttgtgttcttataaattactaacatatgcattagaggagatgtatttgaaagtattgcaattaccgaatgattttgttatttttcaaaaatttaccgacttgtatattgggtgcacaattgattgttttgcattagaggggagtagttgcgacttcttttgtaagagtaccgaataatgtaattaaaaggataaattttacaaagagagaaacaaaaaaatgtgactggccatttttaatatatcagaaagaataagaaaatgaaactagaatctttatttatttatttataatatttttttatttttagatttctctttatttgaggatttagttaattaatttttattattttattaggtttaactgtatttgagattatacttttttaagtgctacaaaatggtcattgcatattctttgagcttacacttttgctattatgacaaagcattaagcaaatatgttatcatgtgattatatgaaaatattaaagtaatggaccaattccaaggcttcttatattgagattctgttgctggcgattccgtcattacgtagcccagcctgagactactttgtcgccaagaaaactcccaaatttaggatatcaacatataaatatatgaacatataattaaggcgttcagaaaaattttagtccactttcgttttcaagtagaattacaccatttaagttctaaatgataagttctcctgaaaacaacaggacgagtgaataataatcacaaagagttacgaatccatttttttcatctaaaatgaataaactcatatggtcatggagtttaatagaaaaagttatctcatgggtgtggatggaagggtggttttgtccgcttgttccagtatattttgaaggatattttagcagatgtgtctcccattcaagtattcaacaatataaagtgtaaactcatgtgagcaattttagaaaaataataaccaaataaataaataaaagtaaggtagagggtaataacttaatgaactaaagaaatgcatggatcaaaatgcacaacaaatatatatgccgtataataaaggttgctgtttatttttaatgtttgaaataactaaaaaaaatctgaattatgttactagttaattacctttattctaagaatttattttttcagaaaatattggttgaagttatatcttcaccacactcaatatgatcaaagatcatcatttatttgttgttctctttgttctacaacatacaatattaatatttaaaaagtaacttaacattgataaatcagctagtgtgttcgaaaattcaagaaacgacaatggtttttattttatttttaaaccgacaataggttagtctcaaattcatcgaggttattgatcaaattgcttgatataacaaaagaaaataaataaaagtattgttgaatattatttggttaaaacaataagtaaaagtaccatgcacatactattcgagttttccactgatgagtaaaaatctaaggaaaaaaattataatatgatgtaaaaatgaagaagagcaattttggagaaaattaagtaaagacttcaaaacagagtaaggacaagcatgaagggtgtggaaataaacgaaatggagcccaatttgaaacggactttagagagatgtggttgtaggagtaccgtcgatggtgttgtcttcaacttcgtgtctgccacatgtgctcacgtaagcccatctttatttttaattgtaatgacaaaagtattagttaactagtttatttatgttttctcttttatcttaggtggatccattttcttttgttgtgatatctcttcgagtctttttttaatgtccaccatgatcatgacgtattctttttatattggtctcacctaaaacattatgtcctaagattctatatgtaagattccatttccatccatattcttataaaatacaataaaacgaatctttgtcaatgattcgaattgcgtttgagaaagatcgtatacttagctccatttacacctacccatagagttctccctaactggctaaataaatatgctagtgttattggttaagaggttgtaattacatattgtatatgtagatgcaagtcttaagtctagaaatttacatgtcttgctttgctttgaattttagaaaagcttcggtagaggagatttcaaaccaggatatcacacgggcattaatacagtatcaaatatgatatataccttacaatatatagagttgtttcaaaaagatgattttggaaacacgctaaaaccccaaacaatgatcatgattcaaaagaaagatataaggtatatactctgcatcagtttgaaatgtaaataaaattatcataatgttataagaaacaagaaaaataaaagaagagaagatgatctagactactaatttaagtgtatcgaaagagaagagagactggaagtaaggagcaaggacccaagtttggaagtaaggctctggcaaaagtttgatggtcagcgagaagcaaagtcttagtacgaggatcttatttgagtaacctttctttcaaatcccagtgatttgaattatttggcctcttacctttaattttaaatatagatagacgtcttattggttaataagacttagcataatcaagtcatatctaacaagagaatttatcaaaagaaaaattcaaaacaacaaaatgttgcaaattcgagaaatatacaaaaggaattaaagtagaaagagaaatggaggttagtttctcttctcttcttataacctcactctttcttggataacaagtttaaaaaatgtgttttaaattttaacactttacagccctagggcttgggattcccatgtatgccaagcgtggagacaccctcactttaggactaggccttggagatggaattggtccgtaagaattagctggtgaaaccctaggagacagactgacttgctccagtgcttgtgcttgtagctccattggataatctctaacacacccaattcttggaccatatccacttgtccatttacaagacagtctctttacaggatcaaacactggtctcgctctctcttctttctctgaaggtatctcaacttcttctgagacttccttcctttcttcttcttcatctgcagtcgatttgaatgacgaatattcctcattcacagaacatctctgcaattcagttcaacaacactcgtgaataaaaacattctcttgatgccaataacacaaatactaatctcataatatttatttccttaccttaacattggtgagatcaacattgtgctcctctaagaaacttatgaactccttgaagttgtcttctgttgggagataatgtccactatatggccatatagcctgaagaaacagaaggtaaatcagacattttagtttacataacatattaagagaagcaaagacaggtagtttcttattcaagtacctcaaggatcccatcgcgggcgactaaccttcctgctgcggttgtggcacctccagataagaaactagagtgctggaaaagacctttctttttaatccctacgtataagtttctagtagtactaagtacaaaaatcgacttggcttcctctgttgaattgatcagagtcatgccctgtttatacattagtctcccatcttctactatcacttcatatgcttctctctccatctgcaggtttcaaagaaacacagaggttaatgagtaatcaacaaggcagagctaactaattagtatagtcgagtcgaatcagataaaaaatcacaccggtcctaagtatctgatgcattgtttttgcagaacacttctagggtgtttctcaagatttacatctttgccgtctcctatatccaacctttagtttcaaatcagtgaaaacagagttttagaacacattcaaagacaggaagatcttaagatggattctggatttaagtccttaccagtaaaagaatggttgtgtgctcttgctcgctgaccagacatcataatagaagtgcaagttgtggccgtaacgatgacgtgggtcaatctgtaatttcaagagatggatcattagagtatattcaatgatagctttggatgtcaagtagggtacttgtctttgatatgaagttacaaagatatttaggttatggggacttacagcttcaagccaatgctgaagagctaatttctgagccttttcatctttagataagcctttcccaacctaagaaagtgagacccacgttggtttttcatatgaaagagagatattgagttctactaataacaccttgacttataagtaaacagagataaattgatgtcagaccttagcagctcgttttctagctcgtgcccatttcgaaacagcggtctcatgtttttcttctccaaagaaagacacagagctcaaatccaaagctgcaccttccaaagtcctccacctacaacatttcaagcaatacaaagggttagtgtaaacatctttaaaagacattaaaaaaaaagacgaagatgaatcaagtaactcaccagagctcctcaacaacgaccgcacaatctgctaagttccttctggtcctgtaactcttgtacaccttttgtaacgtagttgcagctgcatcaagctcggtgacaggtctaggagagaagaacacaaatggctctggtggagtaactgtaggtttcttgatttggattctctcacagtttcttccattcaaagtgttaggcgttgacttctttgtctccaagacctcaaaatctgaatcagtcttggtctctttaggaacctcccagctgttgaaactcaacgaccgctccatagtactcttaggagaattctggtgcctattagtatcgtctctcttgaaactgttggttcttgatgtcaagcctccgtctttaagtttgaagcataaggacccaacttcaagacccatgaccactaatataacgaaaggataattccaaagtatatttaatatagaaaatcccctgcacacattaattaaacaaacagtagtcgcattaaaattagctataccaaaccaattatttgtctcattcaaacattttaacaaataaaagtaccttgtgtgggtatcaaacacaaaacaaacgttccttggtgtttgtttagacaagaaacagagaagcttgaaagaataaagaataaaagaatgatttttgttctttggagataaaactgaactagggatatgaatataatgatgactaagagatcttaacataaatataagtaagggtaggcagttgaagactattgagagagtaagaagtcttcgtttttgcaaaattgttgaatatggaaaaaatattacggaatattcaaagttggcgtgtttgaattgttgaatattaccaaaagagacaaaatagtgagaggaggctaactaggagacagagtatgtggggagccataagagatggaggctaacgaaggtaagttcatggaagttattgagataaggacaattcacataatctttttccaacattaattttgtcgttcttatttaattatataaataactacatatttagtacacaataattttaaagggtttacgtattaattatctaacggtgaagtttaggtcacacaatggttcatgtagaattattacacacgatgacacgaatgtcaaaatttgcgaggagcataaacgttttacatttgaaaactttgtatgcacttgtgttgacaaattaaatcttcggcatgtagacatgtatggttgctataaaattatctgctatttcagagttactcaacgggtttacttttacatttgaaaacaaaattctctcaaatccttacacaaggtctatatccaagaagaggattatgaaagaattgaactagggtttaattcatcaaaaagtcaaacggttcaaagaaatacgtcaagttgtcaatttgcgaattgtccaatataaacatgtattttctatcttagaaatactaaaaatcaaatcgtgttatttcttttgtcaaaaacctgtctatcattaacgttcagacgcagttttatttgttccaaagtatagtttatgagactattgaatacattatcctacaaatggtcaaacataacatatacatttaaaattgtaaaagaatttctatttctactgaaattttatatctttaaagtttcaattgataattcaagtcatacaagttcacacgatagacaaaattttattttgttaaggagtgataagggttacttttgggttttatatgtcttcatcgatatgaacatgttcaactcgttttatttacatggaatatgtcgtacgtacgtccaaaatttatagaattgtagaaaataaacttccaaaattttaccattgactttcctcgaagctatagtagttctgaaattggagactttgaaagataaaagtacaaagattggagtaccactcaactctagctcgaagactttctttaatttctgatcttccacgtagtgatagagatgcatgggatgtttccaggaaatacttctacggttctattctaccaaatctggaaaaaaataaaatgaaaaacaaatcatcggaaatacttacagattttaagttaatgggctgggcttagattgttgaattgggcctcgtgctttatctataattaggctatttacgaaacccagccaatgaacctgagctgagactgagagacatctcggtgaagaagtagcagagatgtcgacggtgtacgtgctagagccgccgacaaagggaaaggtcattgtaaatactactcatggtccaatcgacgtcgagctttggcctaaggaagcgcccaaatccgtacggaacttcgttcaactatgcctcgagggttactttgacaacaccatcttccatcgtgtcattcccggttttctcgttcaaggcggcgatcccaccggctccggaaccggtaacttctacgctttctgattattcttagggtttaagacctctcatttgtatcaaattttcttctgattgctcgctggattaggtcaattgagttttatgtgtgatatatgtaacaggtggagatagtatatatggaggtgtctttgccgatgagttccattcaaggctgagatttagccaccgtgggattgttgccatggctaatgcgagctcacctaattctaatggaagtcagttctttttcactttggataagtgtgattggcttgataagaagcacactatctttggcaaggtaaagcaaaattacttcttttgttttgtttttctgcttcgtgcaattattcttttctagttcttgatcatatttagctgcaacttgtttttaattcttttaggtaacgggcgattcaatctacaatcttttaagactaggagaggttgacacgagtaaggatgatcgacctctggatcctgctccgaaaatattatctgtcgaggtgaaggattgttaatgcttgatctattatagtgttccatgtcttcatattgaggacattctctgattgatactgattctttggtgtgtcattcttgtgatttacttgatattttttgatactctgtatatttctgtgacaggttttgtggaacccttttgaagatattgttcctagagtgttagcaaagacatcagaagaatctgctgctgaaatcaaggaacccccaacaaagcccgtgaagtaagatgttatccatggtcgattgatagctttagctataattttgctttggctgttcttttgagacttttttgttgttgtctttgtgataattaggaaattgaatttactgtcattcggagaagaagctgaagaagaggaaaaggaactggctgttgtaaagcaaaagattaagagcagtcatgacgtattgaatgatcctcgacttttgaaggcagaagcttcagataaagagagggtaagaatacaatttatcttgtttgtggtgtgaactttcccatctttaatctcccctttttttcatgtgtgaaagtgtaggctaagctgtattaaaaaaactgaggcgacttattttatctgccatattgtggaatactagtggagagttcctcgtggttgctatatgtaatgatgcgtacagttctttaactttcttgctgtgtagtctgcctagcagtctatcagtgtgcattagatagttttttaactttatggttgtcgttctttattttaacaagcaatcttgactttctgatgtatttttatatttcagaacgcatctgagtccaaggaggtactatctgtgcgagaagctctgaatgctaagaaagaagcggctcaaaaagataaaagcttttctgtatctgatacagttggaaatagtgatgatgacgatgatggtgaagatgagactaaatttgatgcaaagatgaggaatcaagtgctcagcagaaggaaggagattggagatacgccttcaaagccgactcagaaaaaaagtaattacgttttccatctctctatatcctgatatcctgaaatattaaacttatggcaattcttgatttgaataatcaaatcttcaatcatattaagcaatcatgtctatgtttagggatgttatctgtttatcaacacgatttgatgcttttaggtttggcaccaagtattgccagaaataatatacagttctctcctcatgcgtgttctttacattatctctagttatgtctgtatattctaattataatatacttgtggttgttttcttaacagagagctctagcctgaaaggccgtgaagagtctacgcaaaggtaatgacacccacagttatacgctacgtctctgtatcatttgtcttccagtgtttgtggcttagtcaatatgtctgattcattgttccttagaatactattaatctattctagcaatatctcagtgcaaggcaagctcatactttgtgtgttcaaagttaggctaacagatacatacagcacagagaaagctataaacgcttttcagtgacctctccgtttgaaaaaaacaactatcaaatatgtcacggatgctctcatctgtacctaataacttattcttgatttatgatttagtaatagaacctttcagaaaaatctacttgctttttttgcatgaatgcttgaatatgttttgctttgattcatgatggtgtaaccagtgatgtaagtcattgactcattagttttgctattcacaggtctgatgctgtaagtagtgaagatgagaaaccaaggatggaaaagttgtccttgaagaaaaaaggaataggctcagaagccaaagccgaacatatggagaaaggagacactgatttacagctttacaacgcttctgaacgcgcccggcagttgcataagttgaaaaagcgcagactgcaaggaaatgaggattctgtaagttgtttaccaaatttgtggcttaattttaaatttattttctggcttattatatattccccttcttcgtttcctaaacttgtccttgctttattgtggcatacttattccctaaaagttaaatctaattttgtcagagcaactgtattactactcatctaattcgatactctttcagttgttacttgaactgatcatcgtttccctcctgcgttttcttcaggtgttagcaaaactcgagaagtttaagcagtctatctctgcaaaaccgtttacctcgagtaatgaaccagtagtgttgacctcgagtagtgaaccagttgacaataaagaagaagatctctctgattggaagaatgtaaagctcaagtttgctcctgagcgtggcaaggtaaatctctaaggttccatctcacttgagtgcggatctaatggattcattactacgttgttctgtttagttaacattaaaatcgaaaatccagtagttcataggatagtgcatgctaatcacaaatgatttcatcagaaggctgagctatgtttgtgtttatagtgtcctgtggaagaacctgacagtgtgaaactatcctgcaggataaaatgtcacgcagggatgatccagatgcgtatatggtggttgaccctcttcttgaaaagggaaaagagaagttcaacagaatgcaagccaaacaaaaacgaagggagcgagaatggtctggaaaatctcttgcctgagtttggaaatcttaaccatttaattttgttttcttatgttgatccttaagatgcccgttcactgtcaaaatctctcctgtttaaacttagatacattcagagacatgaatgagcatcttaaataaggtcactagctccaatgatacagaactaatgtgttaatacatgttatatgtaggaaacttagctatataagtgatatgattttaagcccttcaactgacatttatcttcaatagattggtcatccaggttggatggtattcttcactaggatatgtggttcaaaattctagcaaaacatggttagttcgattttttagcaagtttaaatgcaaaaaagatcatatgatattaaccaaattgatttagattgaaccatttggatttgttcaatctaatgaaactgcaaaaggagctttactttattccatgataaagcgtacatggaaagagatactaataagtttgaaacatgattaaacccaacggtcgaaaaatcaacacttatcagaaaatgtcactaaattggtaagaagcattgaagattctgtgttgcttcttctactgaggattgggaggacggctgttagcagcagagacgcgtgagccccactcaagcaactctttgctcgtatcatccttgtgaagaatcacttctatgaaacatagacaatctttcttctccgtcgtcgctgtcgtaatcgcctccactaactcctcttcgtatctcacctgtcaaacacaccaaattcatatgttagtttataaccaaagtctggctaaaactccattgtcatcaatctttttaattacctttgcagtccagcaattgccttcaccgttatgaatggcgtcaacgagaccagtgtagttccagttcttaatcacgttataaggaccgtcatgaatctctacttcaatggtgtagccaccattgttaatcaagaagatgatcgtcttctgtccattacgcagcattgttgatatgtcctgaaccgtgacttggaaactcccatcaccgatgaatgccaacactcgcttctctggtgatgcctgtgcgtatcctagagttgcaccaacagaccacccaatcgatccatactgcatctgaaactcgtacctacaatgaagaaagcaggttcaaatcttgtgcctacttcactataataagtgtaaagattagagtctctttttttttctggacacttacccacatccttttggcagctttagtttttggcaattgaaccaagaatcaccggtttcagcaatcacagcggtttcactagagagcatcttctgaatgtgctggaacattgtgttaactctcaatggctctcttgattcacacttcaatggcttaccttcagggacaaagatcctatggtagttctcatatgcagtctcgttacgcttcaccctcttagacaattccctgaagaaatcgctcatcaaaatgcaaccaaaagtaggaccattggccacagtgatacgatcaggttgcacaacgatggctttttctttcttgaggagaagcgagtaaccaacagagctatagtcgttgaagattggacctgcaaaaatgtaagcatccgcagattccacaatctcagagcaaaaaggagtgctcactgctccccaataagttccaatgaaatgaggatggtgctctggtacaaagcctttcgcagaaggcatcatcgccaaagcatagcctgaagcatcagctagctcaacaaaggcatcacaagctttagccacacgcaacttaggaccaccaaccataactggcttcacagccttattcagaaactccaatgttgcttccaccgcagcttctaaacccatcttgttgctcaatctgataaaaccatttgtgagttttaattctcgcagaaacagagtattgatcagagttcaagtataaattaccttggagctagagaaaaagggacaggatcacggctaaatgtatgatgaggaatcgctgctaagttacagcttacacttatatacacaggcttgctctctttcaaagctgttgatattgctttatcaatctgttcatgagcatcatctaaattgttcaccaccgcctgagaaacaaaaacagaaccaaaatcattcataatccgacgctaattaatcttcaaaatatttctaattagatctgattttttgtgattacctgataacaagtcaccgtttggaagcacctaagctcttggctaaaatcaggtaatccaatggtgtgatgaagaatccggttagtgccataatcgttagagttaggacctccgacgatacagataagaggaagattctcgctgtaagcaccagcgatcgcgtttaaaacgctgagtccaccaacggtgaaggtaacaacgcaagcgccgactccacgagatctagcgtaaccgtcggcagcgtaaccggcgtttagctcgttacaacatccgattaggttgaggtccggctcagccatgaggtgatcaagcaaagtgaggttgaaatctccgggaacagagaaaacatccgtaacgccggcttggacgagacgacgagctaagtgacggccgagagtcgcgtcgcagtagttgatggtgatagcggaggaaggaacagagttgtggattgttgcgacggtgccgtttgttggactacagacgtcgccgttcgtcggcttgcaatcatcgatcgatccgattttggtgtccatggaaatgggaaggtttgagttcactaacagagaaattaaaaaactgtcaagtttgtgtatgtgtgtgagagatatactctttttatttttgggatgagtaacaaaatgagaatgggagaggtttttatatagttgttggattagagactaggaggaatacatgggtggttttttgactagtggtttttggtttctgttttcttgtgcaaaaagcaaaaaaataatatctaactttgagatttgacccaaacattcttcttcttaattattgtttatgtcggtctaaaatgcatttactgttttagtatcatactactcccagtaaggctgtaacagattattaccattggaaatatcttaattttccaaaattgaacatcaatacatcagttatttttgtgattctcctcttaattatgaactaatttgttatacgtgggaacaaagttataatatccccattccaaatttgagttaatttcaggtttttagccggaaacaataatttgtatactcatcagttattattgagttaattctttgggttcacttttaaagtttcaatgaagaagtgtaattgctagcgtcaaacggcaagagacgtgatgccatttgcatttggtcagcaaactctattagaaaaacatattcggacgattatcgtcgttgagatgcagatggttttggggtttgcttcttatagtataatcagttaagtaagaaatatctacaaattttaaattcacttaatcgctttggttatatactaatcacacaaaagatacacgtagatctatgatggaatcttgtttttgtcgtcgtaactttcaagatcaatagtgatgttacggtaattatatgattaagctcacacatatatactgtcacacatacatatagtgtaattcaagggaaatagcttacaatgtttttttttctttttttcttttcatattgatatttcctagaaaactgtatatcaacatatcaataatttttcataatgtaattatacataaatttatgcaattttcttttttttgggtagcaatattaagtatttatgcaaaaattatttgactatgatcacttttattttttagttcttatagattgaatatatatatataaaatccaagcgtgcaataatagattttatagttttgaggattgaggttaaaatagtcatacccaaaaacttgtataaaagcaatataaacaaaagcttttactaaattaaatcatttatgtatataagggtaccttatttaaataaaaaaaattaaatcattcaaaataatatgagcagacctaaaatattggggccaccgtcattctaaaccgtctcattgtttgtttcataaaccaacggagtcgccggtaatctcctttgcaacttgatttctcaacaactaataattaattacttttcctaccttttggttaaacacatgaaattaattactatatcccaaaccactatgatcgtggttttaaagaacgtcgaaataggccacaaaagaccaaaaaaaaaaaaaaaaaaagtacgtcgaaataattgagctgtagcactttttgttttagtaaagctaatggtaagtgtttcaattggtcaattgattgtttttatatgacccgttgtgttgagtgttcttctacgtgacgagacaaaacagaaaataatattcttataagcttgaaattgaaatacggcgcatgttcaatactgagaggtgaaaacttatgtgctgcaacggtgatacacgtgaccttcatgcgtctcctagtatttcgtctacggccctaatggtgactcgtatgtcgtaacgttaacgtatccgattcgacgacgacgaccaagatttctttttcaatagaatatttaaatttgtacagaactgaagacgtttcgagaatcaaaatatatacttcaagaagtagcttgcaacacaataaagtgcgtcaaattttatttgttctgttccgaaagccccactttttcccagcgttcaggctatttggacattgggcctaatggccctagctagttaaatggctaggcaaattttcattatgaattagattttgaaatgttttataaggcttgatcatgatgagctttctgctacagaagtctcacattatcaatttcatttcttcgataagtggaaaactacataatgcatttggttgtcccgttgcatccagtttatatagcagtaggttttatagctaatttgggttataaaaaacggattgactttggcatagattgattagaaacaaggccgtttttgtagagatattcaagattcctatccaatcatgtaatcttcttccccataaaacattttcaatctttaatataagaaaacagttcatatggcataaaagtttgtaagtatacaatagacaatgtaaatcgaagacatatcgattaaaaacttaatgctatcatcattgtttgggcaaatttaatcggctgtaagatcttaatgctatcatcattgttcgaaataagcattgaataaattactgaatccctttgtagtttagtttccaaacgtttctgaaacgttttaatccctttataagggtgatttatcctacatcataggaaaaaatgctagacaattctagtaaatagtttgcaaaacccaaagatcaggccttacaatttgactaccatagacagaatacaactgatggattatagtccatatgccctaattatgatcataggcttgtattaactagaactcgagagatgaccatttttcagaagtcaaatgaatagttgagggaacctagctagttatatgtattcgtgtctgtgatatgtgattgggctgtcaaatctatgtctatatgtaacggttcaattcccacgattttttatgataaaatatgtgatagaaaaggatggcatgccttgctattaaaattgatgtttcatacttcaccgctggtgtcgtcaatggctctttgctaataaactactactaaaagaaaatcattgagctggcatttcttcaattgtcacgtaaaagacaacaacaacaaaacaccaaagcaatatttttttctctattctattttcttaagctcattttcttttatttttaaagagattcctttctcaaaattgtaccgtatacattacagctaacacgcaatcgatcatatttaaatttgagtactaattctaggctagctacagcatgataacaactaaaaaaactcaactatggtattgagtgttatggttcgatttcgtatactatttattttactgtaatcgaaaatttaatagataattatgtgttcggagttaggacccataacaagaatttacatagataatcatcatcatcgtttgcttaatgctacgttttttttacattatttgcttggctaattatgctcttgacacgttgttttagcttaacattgaattcttacgaatatatgttgaaaaaagtttttatgtggtgggtcagcactcagcagcttagatatatatgcaatcactttgtgcatcatgctatgtagattagctaactctcggcagcaattcatgtaaaagtaaaatacgagtgattggtacattaaaaacttcaccatcctcttgcccaatgttggatttctgcttagtcctcaaatcagttgttggatatccagtatccacatttgagtgccatgtttctgcttaattagtcctcgaattattttattgattttgatgttacacaatatttttaaaaatgaggaaaaatacaaatttcaaaaaatatctgatataacctggtttctcttttctttaatgtttcatggttgtttgtttattgcctttacagagaataaaccaaagagtttattcctgcaaataattaacgttagttgtgttatacacattcatatgaatagtgaatcttctgcagtcgcatgtgtaacattcaattgcgcaacaaaggtacaaaagcccacttgccctttttaatctcttttgaattttgatcgaccctggattttgatgaactaaattcctaaaaccatttgtgtttaataaataattttctgaaaatatatcagccattgacgtagtgacacgtgtaagtgtggaaattggacaaaacactttttaacttttttttgatgtttgtgaatttcattgtctctaattatgattacaacgcagcattctgacggtttgctccctcttacagctagaccaccactaccttttcctaaacgaaaaaaaagagattacatttttcattttaaaaaaaaaatttcctctgattcatataaccaaaaaaagaaaaacataaaaaacgtctctacctaattttattcctaataaatgacctgaaatgcaatagctttttaaaggctatgattggtcaaacgataacggttgacattttacgttctatgatttcttgagtggttggtaatggactaatggtatatgtatcatcaggtattgagtatatctctatatatatgcatcttcatacctgcatagcattgcagaaaatgatactaaataaaactattagcataattttaagcaaaaatttaagccttattcacaccatcattttactttgagactccaaatgattcattaaactcaaactccttttttttttgtcttgagtgtacaagtttagcaaaaaacaaacaaacttaaactcatctaatatcctatgtttttggagagttaatgaaattctaccaaattttatatgagataacatttacacaaaaagtacaatataggaatatatagtagaaaatccagataccatagtttaagatataattaaaaaggataattttcttgtcaaaaaacagaaggcatatataagctggatattaatatactaactatcatcacacccaacgaatcctatgcgcgtgtgaaacccacgatccaatcacgaagctaaattcttcagcttcgttgtataataaattgttaatcacgaccgtcatattcctattataccctttgacagcgacacactctctctccaaccaaacatatctggaaactacaaccacgcgcactcataagcgcgtgagacttctatttttctcttttattcactgacaataatcgttacaactttatctgcttatcaaataaaagctaaataataataaaaatatttttatatctgaatacttcccaaatacagagaagccatttcaacagaaaatcgacacgtgtccatcagaggttcgtcttctgagggtaaaattgtaaactcacgttgtctccttcatcatctctctcttttaagaatttccagagcgagagagtgagaaagagagagagggagaggtgcttttttagtcgttctcgtcgagagacttatttatacacgaaaaaggaagaagaagactgttgaaagcgagagagagagagagagagagagagagagagagagagagagagagatggaggatatacaggaggaagagaacggtacggacgaggaggttctgggatcgagcttgaccatggagaaagtggccgcagcgaagcagtacatcgagaatcactacaaagctcagaacaagaacattcaagagaggaaagagaggtaccaatctcgcttcttcttcttctttctttcactaagagagatttgagatttagaattttgttttgatttcgagacattgtttagggtttaattagttgtttgagcttgattctctcttaatctctttcctgcgaatcgtttagttttctctttgatgataagcttgcgttggttacttccttgtactgtgaacgttttagtcatttgtggctatggaagagctcagttctgtatttaaccaacattgtttgatttgttatagacggtggatcttagaaagaaagttggcgtcttctggagtgccaaaagaggagcaaatcaacatgattaaagacctggagagaaaagagacagagtttatgaggcttaaaaggaacaagattagtgtcgatgactttgagcttttgactatcattggaagaggtgcttttggtgaggtttgtacaacagattactacctctcccttttattctcacttattcttgcagctcgagcatttacaactttaccgagattggtttctgggtcctttcttaatgagtatggtacttttaatcttagaaataacttaatcttatttacaggttcgcttatgtcgggagagaaagtctggaaatatttatgccatgaagaagttaaagaaatctgaaatggtcatgagaggacaggtaaaattcgtaaacaattggaatgatgtgccacagctaaaactgattatatttatgcttgtctctgagtttacctacatgtctgtttcttctagtataatatgactaaaatgagtgtacattttgcaggttgagcatgtcagagcagagaggaacctgctggctgaggttgaaagccattatattgtgaagctttactattcatttcaggatcccgagtatctgtatctgattatggaatatctccccggtggtgatatgatgaccttgctcatgagggaggacacattacgggaagatgttgccagattttatattgctcaaagtgtcctggccattgaatccatacacagatacaactatattcataggtggcttttggaacttgcatgcttctggtgtaaactgtgatatttacatacaatttgattgacgttctgtcttctcacttttgcagggatatcaaacctgataacctacttttggacaaagatgggcacatgaaactctcggactttgggctctgtaagcctcttgattgtagaaatttaccttcaattcaggagaatagggccacggatgatgaaactatgtcagaacctatggatgttgatagatgctttcctgacactgataacaagagaagctggcgcagtccccaggaacaacttcagcattggcagatgaatcgcagaaaactagtatgttaatcttttgttggcgtatataaaattctcctctccccttcttttgtagctttatctccatttctctgatccctttatataccaaatgtgactggagcatgtagatagataaatcaaaaaggggaataatgaaaaccaaacatggtattcttcatattgtaggggagcggagaacacttttcaattatcacctgtactgtctgtttattaatttgtgtggcaagttggcgacaactgatgatagtgctctctgattggtttctcattttttgaaaggcattttcaactgtgggaacaccggactatattgctcctgaagttttgctgaagaaaggatatggcatggaatgtgattggttagtctttttcttgaacgtttatcatgtttagaatgaactataaccatggtgcatggtattttactctgttgatagtgctttagctatttcaatctctctgctagcaaccatttctacagcttgataaaaatctttcatttgtcattatgcaattgttccatagcctcctgagctgtttatttgcctttgaaatcttgtttttgtctctcaggtggtcattaggtgcaattatgtacgaaatgctcgttgggtatcctcctttttatgctgatgaccctatatcaacttgcagaaaggtataaaatcttgcttttatgttcactatcctagtgagtttactgtgtagtataaaacagtgtgagcaatttgactggcgtcctatggaactgaatatgactgtttgtatacaaaagtgttagtcacatggtaggaccataggagagtgttcaattctgtgaccaaattttggattataagggtgtcaagttatgtagaaaggccacaattttgccagtttatgcgcgtccaagttaggaaaatgttataatattatgtccagtcttttcatataaatttgacaactatgctttgatatgtgggtaaaatttccattgtcaattccttttgtttgttctttgtggatgcataaaagaaaaacaagagattttgtttataagattcactgatcatgttcatgaagtcttaattccttctgctagatcgtccattggagaaaccatttgaaatttcctgaggatgcgaagttttcatctgaggcaaaagatcttatctgcaggttgctgtgcaacgttgaccataggcttggtactggaggaggagcccagcaaatcaaggtaaggatgctccatgagaagatttagtagtatttaagataacctttgtcatttttctttgttaacttgtaccttaaatttgcatcaggatcatccttggttcaaggatgttgtgtgggaaaagctctatgaaatggaggctgcgtacaaaccagaagtgaacgacgagctagatacacaaaattttatgaagtttgatgaagtatgccgtaaattcttctttttaatttatcatgctttatttagaaaatgttctctgaaaaaatagacctcccttataatactttaagatttatcgtaaattataccagtatcaaggtcaacatatattagattttccaaaattcattttaatgtgtgtggtttatatcttgctgtgaattgtactggttatcccgcacccttagtttctgatatgccactggtgatgatggtgatacctatctgccttatattctgttggtcagtattttgcagaaatttatattgataaaggtcaaccactcactgatccttattagggtcttagagtaataattcaattgaatttgagtaatttttgtatcatataggaggcttactgaacttcttgatttcatctcaggtgaattctcctgcacctgaaagaactagatcaggactctccaggaaggtttgtgattattatttgtgtatacatacattatctagcgcttttatttgcaaggatatgtagtaatcgcaaactgtagtaatgttgctactgaagtgatagacagaagtgctcaatatgtattatcgtctgagatgaaaccttttttagatgtttcacttttgaacgaaacatgttttttttttcattgtgcagatgcttcttgctcccaaggatttaagttttgttggctacacatacaagaactttgacgctgtaaaaggattgcgtcattcacttggtaaattcacatgaccctactattattaaattatttttaatcttgtaccttgactcgtgaattctcctagtcaataaacagtgcctgataatatgttttaagtaaacgagacgcaagaatttattgttgatgaagaccttaggaagaattgaccctttttttccaattctgtagagatggcaagaactatgtctctagatcgatcaccaggtaacttgtgtttcaacattgaaaacttccttgcttcgtttatttgcctttttgcgtgttcagatccataagcttctttcacagatatatatacatcctgagattagttttaagttcatgcggtgtatagtttataccactttgtattcaaaaagtgaactgatataatcaaaactttgatgcagctgaggcgatgcctgtggagctgataagcggggaagcagcagaggcacagatggtatcatcgatggatgatccaatgataatttgaaagaaccgatcaaagatataagatcttcctcaggtttgggatcttaaagccttctaaaaaaaaataactgtacagcaagcccagaggttaaagaggaagaagatcaaaatggtttgtgtgggagattgattaacaatgttagcctttcctgattattctgtgtattagaagaagaagacaagagaagggagaaaaagatttagaggtatgagtaaaagtctcagtgttatataaaagctgcccaggttggctgtagtaatgttgccttctctagtggcagttttattgcaacttttttactttttacctttatgtatgtgtgtgtgtgtatcaacttctatttctaaatttgaagacccaccgaggagtgaggacttagattgtatatttgagttttgttgggagtccatttctaaccaaacttgtatattaaatttaaaggatcattttgccttaggttgattttaagactaaattctaatgtagttctagtgccacatgagagatgatattgtgaagataagcaattaaattggaaactacagacctatttatgtacatctgagttttcgatccatagttccatacaatgcacagtgcacatctctttcagtgagtataaacgatcttttgacgattgagttctctttttgaataatttactcaatcacaatttacaatgaagttacggcttggttgatatggttaagatcgttacaaaagatataattgttaccaaaaaaattgcgtttttgttagccaaattgtatatgttcgttcgttcactaattaaacaagtacaaaaaaactgtgacacaagaaactgtgtttaatcgatccgaaaaatgtttgcattataaatttggatcatatctcgatttaagcgtgtcatccttgcgcagggcacatgctaatcttctctgtatcgttccaattttatcggatgtccacgaagggacaatcatcttagcaactctaactatatatatgttcttcctctttctactgtataaccgatgtgggacttatcttatcgcttcagctataatgggccttcctttctacttagttatggcccattataatatagtatctcaccgtataaaaaaatcactagcgttttccccactaaacccatttaaatggaaaattgactgaccacaacaaaaaaaggaaagtctgttcatggattctacttcttcttcgttatctcgaaactggagattccacgccttcccgagcttttgcggagaagatcttcgtaaaacctttctaagctatttcctcaaggagttgcaaaggaaatgaattcttttaaataagtcactgtatcagattgtgtgtatttttaattactcacgaatagttatcaactacagttaagttctagacttttatgatccactatacaatgaaggtatcccacgttagtagtccacgagtcggagtcggaacggacctcgaaaggcaaactttattgatggcaaatccaaaagttcgaaaagtgcttttaaaattcggtgttgagaagaagaaacaacagatgtttttggcttatagaaaacatgagcatcacgagtcacagatgattagttaattctcgagtagcggagttcttttagtttgaagagagctgagcaacgagctgcgtgagattatcttccttcttgatactctccacccaattggcattgatatgtaccctttcaatgctctgcttcaaggttcttgccatcgaaggctttgatcttgttgcaaaaaactcctccacttctttggctttctcaaacgacgcaaactgagacaatcaacataaagtgtaatcaatgggaaaggccagcgagaggatcaatagctattttatggatatgcataaaggggaggaggaacaaaccggcgatacaactgcacttatgaagcgtgttatgagaaatccggagccccatgtgtttcctatatactcccacttttcctgtagccatttccaagctacttcacgtccttcccaacttacaccggaaagtccataaagtgcatcttgattacggacctggaagaataagaacctcacatcacatcaattttttcaagcgcaatgatattgattatttactaactctacagagtggaaagcaaaatccatataatctacctcatcagacaatacgaagttaagaacatcttgaactatagtggggtctgggcaagatgctaaagaacctgcaaagtcacaaaggaaacattactacttgaaccacaaatttttatttattttatttttcaggtacgagaccaaagtttgcagtcaagttacctaagattcgtgttttctcttggctcaggtcggtttccctataaactctcagaagagactcataaccagatttgtctgatttgttagctctctgcattacagcaacataagcagcctgcaaacacaaaacccatacagaaattaataaaaaggttcaccattccagtttcaaagtgttatcgggttctatgaaaagaaacaaacccttctaatgtcaggaggcagaagcggagtgttcctatcagccaaaaatgcatcaaatcttcgaactgcttcctttagtgtctcatcatgcccaaacacagcaagtgcagttaagacttcccctctcagcatagcatctagatggctctcgccttgcttaggatcccaaccaagtttcctgtaagaacaatcagcattgtaacgacattgttttttttttgtttagtaaaacagaacattagtctaaattctggagatgcgtaaaacagcttacccagcagcaaactggaaaacgccaatgaagaaatgtttaatcccagacatcagttcttgatttgcatctgctccaatcttcacaactttgtagcttatctgtatggaagaagagtaagagccagaagcaaaagcaaacttatggaccagggaatttaaagacagaaaggggagatccttacagcaataagatttgacagcacagtatagtcaagttccttcttgtaagcactacacaaagtgagcaatgaggccagtgattgctgacgagccatagtaagtgcaaacgaatcatccaaaatacctgtgaaatacaaagtaggatatctatctccaaagaaatttcattctgtcaaccagaaaacaaaattctgcaaggttgaattaccatatctatcgatagaagtcaagctttggctctctgttgcatttctgagtccagccgcaaggctgtcatcatatttcaccctatagaatccagcctgatcaacattgatttttatccaagaacatgtcccattaattttgtcgctaccatcggcaatggagcagcccaataattcctttaaatcatacgctccagatttggattctaataagaagtttttgcgcttttcatatgaaccacaacacaaggtcactggtacaatccattgtccttccccaggagaaccacttgacaagaatcgagactgaaaatttcaaatgaatttcgttacttaatcatgcacaatatcccaaagtggtataaacagaacatccagaaagggaaataagtctaagtacctgctcgagttccaattttccatcttttattttggctgagacgacaggatatcctttttgctttgtccaagaactcataagcttgttcacaggttctccggatcccgcttccaaagcagcccataaatcttctgtcttcgcgtttgaataagcgtgatttttaatgtatgcagcaagagacttctgctcaccaaaagccaaacaagtagggtaagatgttttggagacattagtgaaactggaactagaagccaccatatttacatgcataatataaacgctgcaattcttttgtaactgaagaaatgggcatgagagcgaacctgaaaaacctcagcaccaagatagctttgtagcatgcggatgacagatgcaccctttctgtagcttattgcatcaaatatttcatcaatttcagcagcatgattaacctccacctggggaaatttatggacttatgacaaataggcaatagggtatctctgggatcgatagtgaaattaaggaaaaccgacattattctgtgaagacatattgacagcattttggttacctctatcgggtgagactcctcaagcccatctagccttagaccctcagtagattcatctaaaaactgggtccagattttccattcagggaacaaactatcagtagccaagtagctgacctgaaacagataaagagtaacaatatattcacaacaaaactcaaaatcattgttaatactaagacctaagtttgcaatgtacccaagtagcaaaaccctcattcagccatagatgagtccaccactccatagtaacaagattgccaaaccactggtgggccagttcatgagcaactacagtggcaacctagcagcagaaatttaactgctttagataattgcacaagagagcacaagacaatttcctctagagaataaatggacatgtttacagtaccctctgtttgttagaagcagctgaatgttgttcatcatagagaagagctgtttcacggtatgtaactaaaccataattctccatagctccggcagcaaaatctggtattgcaatcatatccattttgggaaggggatatggcacagcaaagtacctacaagaatgattggacttatgcaatgagatgatacatccattaaagaagctcagaaatatgcatgcacataaagtttcaaatgtcaacgaaggacctactctttgaacagatccaatgtcttggcaccaacatgcaatgcaaatttcccttggtcggctttgcccacttgacagtatactctgactttaatccctgagaaaaagatgaaacttgatttagagcttctcgacttgactagacgggagataataatggataaaattaatttaccatcggatgtatgatcttccacgtagtcaaacaaaccaacaacaattgctaccaaatatgtagacatgattggtgactcttgataggagacaatcttcagattcccattgactttctcctccattattggcatattggagagagccaccaaatcagttggcacctctaatgtaatcttgaaggtagcctgttgaacaatgtgtcaatattgatagataaagacagaagaagaacaaaatcaccaacttgataaactcatgctgatagaaagaggagggaatgagaaagaacaagtggaaaccttgcaagcaggttcatcccaacatggaaagcatctcctagcatcagctggttcaaactgggtaactgccatattcttcttctcaccgttatgttcataagtactgccaccaagacaaatacaagatcgttctagaattaatctcgagctatctaacagtaaaaaaagatcgaaactcattgctttaccttctgtagaatcccttcattttgtcatttagtactccattgaaaccaagtttcagaactcccactccatggggaagaatctcaccaaactcaagcacgagaatctcatcctcctcaaacaagacaacttttggagctgcaagcgcctgcttaacaaaacataagaagcaacaacaagctaaatctttgctgattccagattcaattccaatccatgacagttttctaaagttgaggattggtttttcagtcgaacagaaaagtctggctgaaacgtgattgtatctctctagttaatttaccattggaatcaaaaatcatagatgatgatatccaaatactcagatcaagaagctaatcatgaaaatgaatatctccaaggcgctaattagctcaaaaccataactccaatcacattgctaaaatcggaatccataacagcaaaaaagaaacgcgatagagagaccttagaggaggaaggaggagtgaaggaaacggaggcatcgttgacggagagatcagctgcgttgagaacgatgaaacgagtatcggcgactatgtcgagatcgatggctacagttccagtgaaggtgcaggcgatgagatcgggattgaggcggagatcgtagcgcttggggacggcgaacttgggtagacgaggctcacctttgaactgatccattttctattacttgcagatatgatttttttttgttttctcttgttggagttttgtcttttataatacgagggttgtaagcaattgttttatgttacgccacgcgagtgattcgtttctagtagaggacgcaacgttaataacatttacaaaacattcaataatatcactatcaaattcaatgacgttggattatccattagcatctccaagctaggccgaatatgacaaaatgtgttttgaccagtgaagaaatgtttaatcagattacacttgttcataagaagattcaatgtcactactactcgtcaactcaaagtcccgcggatctagtttgaacaacacacatttaatcgttctatatcctcaatcatctccttgatcagattcccaacatcccctgagtcccatgttgtactgatgaccagggtgatcttcttggctcggcgtgtccgtttctcgaggagcatccgccatgttccacgtagcttcatcaggttgtagcctctgtcccttggagctcggccattatacttaacagtgagatgaagatgatctttattcccttatttatatcatcataataagactttaaaattttgaattgtatagtttctcttttttaatgttaatttcctctctttctttttttggtcaacgagactaatttagttttctttcttgcctagggttttcgtcttctgaaacgacgtcgttaggatctttccaatcgagttcttcccaagcttcgtcgtcgtcgtcgtctaggtcgggtgtttaaatttacggtttctgagttagacgagagactctcaatctcggagaatctgaggttttacgggatatcccgttttaatcaaattcagggtaaatttcaattctttttccttctgagatctgattttttttcttttttttttgggtattgaaattctattatccttgaaaagcttcatacttcttaaaactttgcattgtctgagtttcatttttgatacaatctctctatttgattctttctgcaactttggttatgttcatttatatttttagagtatcaaaaatgaatcttttagttgtcttttggtcatcttggattatatttctctgtttgtgatgaattctgaagcttgttgttgtgttagattcttattgtctcactgtttacatttttatccttttcttaagagtgatgatataggttttttttttttctgaattatagatagatggattttcagagttgctaaggtgggacagagtattagtggtgattgcaacgacaatgggcttattgaagaaaaaagattcaacttcagctcgctcctctacttctccctgcgccgatttgcgaaacgcttaccacaattgcttcaacaagtgagtttcgtttgtttctccttttgatggatttagctagttgctgggtttaagggtttagctttggttagccaaatgggtatttttttcagggatttcatttctggtcttttgaaaggtttggaccatttggatggcattgtcttattcctttttcctttctaattcttccctttggttggtgtatttatctgtctgtccaaaacgctaaaaattgcatctttttttcttgatttttttctgcagatggtactcggagaagtttgttaaaggccaatgggataaagaagagtgtgttgccgagtggaaaaaatacagagactgtctctcggtaactcactctgcttctctgcttcatcagctctattcatgtttcctgtgatctttaatcaaatgataagcttctcgttcctgagttttgattttcggttttcatgtaattaaacaggagaatttagatggtaagcttctcactcgcattttggaggtagatggggagctgaatccaacaaagcaagctactgattcaaaagaatccagttcatgatacttgatccccatgtttttcgagataacattgtcactttaaaaagattgaacaaactcctttggtatgaaaccataacatcatagaatacaaagtagaatgggattgttgtattctttattgaaaaattggaagaaaaataaagaaatcatcatcatttcttcttgaagaggaagtgtgcaaccatccactcttctccattgttgtatccgaaaagctcagcaaccgcgatgaagaaggttctccagtaaaccatccacttcactgcttcttctttcccataagtcacttccatgattttttttactgcaactatctccttatccattctttttagccactcttcactgcaaaatgttgtttaattataaagttacaaacattacaagataattctcgtcttctctagcattttacaacaaatcttccgagtttttttaccttgtttttgcataatgcgtcccgcttacgagccaatgatccacaatcgaaacattttcctgaacaaaacaacaacatattgatatatttcaattgatcataatctactgaatcatacacaagttataatgtatattacttgaaaatatagcagaagatctgctgatggcattgttcctccgctgaagaagtgtcttgtgatccagtcatcgtcattcacatcctatagtgaatcaacacaatctcaagattccattattgccaagaaaacaagaagctatcaagttagacattgatccatacctcaaagtggtaagcaaatgtcttatggcagaaatagtgaacaaacagaagactatcttccttcatccactttcctatcttctttagtagctctccatagtttttcatatgctaatcacaatcccaagccaaagctaagatataaacctctgatctttgacaggcaaaaatataatgaagcacagtacttaaagaaacaaatccaaacctcaaacatctcgatggagaatatccgatcgtatgtcccttcatgctcaaaagtgctaatatccgcgacaatgatttcgatattctgaagcccgagtttccttcaaaccatttgagattatattaagttccatttgtagcagctagaactcgaagcttaagatgtatgagaaacttagttaccggcatttctcatcgataaatgctttctgcgttttggagttgcagataccggttaacttgcatttgctgtacttgcgtgcaatgtacaaagacaaggatccccagccacatccgatatcaagaacactttgaccatcttccactttagctctttcacaataaagagccaaaattgcttcctctgcatcttctaagctacttgaatcgtttgagaagtaacaagagctgtacttcatgtttcttccaaggacaagttcgaagaaagctgtcggtaattcatagtgttgagtctttggcttctcggtatggatagctataggcatcttctttatagctgaagtatagaacatcattcataagagatactcgttacattttgcaaatttctataatgtgacaaactataaaatgttctaattttacaaatgtttataatttttcatttgaattagtcttataggcttagagacgggagatccaatgatccaatgtaaattttttaaaattatacaaatatattaaaagaagaagaaattttgttttcgtggatctctcaacaacaatatctaaactactttttgtttcacatttcatttttactcaaaaactcaaacatcaacaaaaattaatattgtgcggcgctaaagccgtcatgttagttgtttgcggacgaagccccacaagcgaagtacgtgtaacaacttgcaacacacacacaccagattgtttcaaaatcgtcataataatcactcaataacaccaaagcaaaattaacaaaatctagtctaaaatataaataaattaaatctagatgttgaaaagaaaagaaaaacgagcttttaattatatatgtgtcagtgacacttacagtcaacaaaacggaggagatcggagagttgcatctccgccgtgggtttgtaaccggaacggagacgaccggccagaagcagacgtgtgagccgcctaatgacaatatccggcaacagattcatctccaacaacgtcaaacccaccttcactgatgcgccataagctacgtcaataatcttctccatcactgacgcgccttccttttttttttgtctcttgagttttttttccctaaggtacgatcttaatgagtgtaacgttaaacatataaatagacacggacgtaaagtaaataagaaacaaatcaaactcgtggctttatttcttaattcaacgttcagcccactaaggattgttaattacctatttacctgtattaccttattcttttgtttgacttccatgtgacctaattttagtttatacgattcgaaaaacgtatatcgctattaattataattttcttatatttaaaactcttaacaaaaccttatcttatcttatctttttgcagttgtccgtgcttaaaatcagatatcgccattttgctatgccaaagaaaagttggaaccgggccggtttacgactttgatgggccttctagaattttattttttgttttttggggccttatattatgttttttaatcggtagttaaccgatcataacatagattaattacttttatatcttttgttattccaattgtagttaatcaaaaccaactctgtaagttttttaaaatttaattccggatgacaactacacactagttcttattctaatcaaaaattattatgattcaaaactttaaaaacggatacataatattcaattgacgaaaatagatatgttcaatgttcgacattaactaaaatatttaaaaaataatttagaatcgtatcatatataaaattaacattaataaaataaaatgagtttttttggtggaatgagtttttgattaacattaataaaatattaaaatattattatctggaagtagatggttagctgaatccgacaaagcaagctgctgattcaaaagaatccagttcatgatacttgatccccatgtttttcgagataacattgataaattgtcactttaaagaagattgaacaactcttttggtaggaaaccataaagccataaaatcacagaatacaaagtagaacgagattgttgtattctttattcaaaaagtggaaggaaaataaagaaatcatcatttcttcttgaagaggaagtgtgcaatcatccactcgtctccattgttgtatgcgaaaagctcagcaagcgcgatgaagaaggttctccagtaaaccgtccacttcactgcttcttctttcccataagtcacttccattatctcttttacggcaactatctccttatccattcctttcagccactcttcactgcaaaatgttgtatcataaaagtaacaaacattacaagatcattatcatcttcacttgctttttacaacaaattcttcagagtttttaccttgtctttgcataatgcgtcccgttaacgagccaatgatccataatcgaaacattttcctgaacaaacaccaacatattgatatatttggattgatgataatctaccgagtcatacacaagttataatgtatattacttggaaatataggagaagatctgctgatggcattgttcctccgctgaagaagtgtcttgtgatccagtcatcgtcattcacatcctataatgaatcaacacaatcccaagatttaattattaccaagaaagcatggtgaagtaactgactaaacaagaagctatcaaattagacattaattgatccacacctcaaagtggtaagcatatgtcttatggcagagatagtgaacaaacagaagactatcttccttcatccagtttcctatcttcttcagtagctctccatagtttttcatatgctaatcacaatcccaagccaaagctaagatataaacctctgatctttgacaggcaaaaatataatgaaataaaaaccaatccaaacctcgaacatttcgatggagaatatccgatcgtatgtcccttcatgctcaaaagtgctaatatccgcagcaatgatttcgacattctgaagcccgagtttccttcaaatatgacatgtaaaacaaaccattttagattaaatttaagttccacttacactagctagaacttgaagcttataagatgtaatgagaaactttgttaccggcatttctcatcgataaatgctttctgcgttttggagttgcagataccggttaacttgcatttgctgtacttgcgtgcaatgtacaaagtcaaagatccccagccacatccgatatcaagaacactttgaccatcttccactttagctctttcacaagaaagagccaacatagcttcccctgcctcttctaagctacttgaatcgtttgaatagtaacaacagctgtatttgatgtttcttccaagagcatgttcgaagaaagctgttggtaattcatagtgttgagtctttgccgtctcggtattgatagctataggcatcttctttagagctgaagtatacatcattcacaagacatttataaaacatttctttacattttgcaaattatattatgtgacaaactataaaatgttctaattatccaaatgtatatatttttcatttgaattagtcttagaggcttagagaccggagatccaattaacccaaaaaaactgacatctaattttttaaaaattatacaaatatattaaaagaagaagaaattttgttttcgtggatcactcgacaacaatatctctaaactactttttgtttcacagttgtgcggcgctaagagcatctctaatgttcatctctatatgtttttctattttagaattaactatattttagatattttttgctttaatgtaaatttctaatatataatttcttttaaaatagaggagagacattagattactttatagagatatacattatctttctcctctattttagagtaaactctattttaaaacatatattagagtattttcaactctatttttatctttatactatatttttgtatttatttcagttcaacttatctatatttttatttctaaaataaagatccttattttttaatatatttagaagaaaatagaaacaactattagagatgatcttaaagtaaaatacctttaaaatataatcgactctaaagtaagaaaaaatagagaaatagacattggagatggtaaaaacgtcatgttaagtgtatacagtcaaaaccctacacaaactatgtatgtgtaagtgtaacaacttgcaacacacacaccagatgtttaaaaatcgtcataataatcactcaataacaccaaagcaaaattaataaaatctgctagttctctataatagctttgtaaactataatctcaaataaataaataaaatctagatgttgaaaaggagcaactatatatgtttcagtgtcacttacagtcaacaaaacggaggagatcggagagttgcatctccgccgtgggtttgtaaacggaacggagacgactggccaaaagcagacgtatgagccgcctaatgacaagatccggcaacagattcttctccaacaacgtcaaacccgccttcactgatgcaccataagctacgtcaataatcttctccatcactgatgcgccttcctttttttttttgtctgttgagtgttttttccctaaggtacgatcttaataagtgtaacgttaaacatataaatagagagagacgtaaattaaataacaagaaaaccaaactcgtggctttatttcttaattcaacgttcagcccactaaggattgttaattacctgtattatcttattcttttgttcgacacttccatgtgacctggttttaaagattccaaaaacatactatatatcgctactaattataacttttttaaatataatttatactaccatatataaattttaacaataaaactttaacaaaaccttatcttatctttttagtccgtgcttataatcggatatcaccattttgctaagccaaaaaatttggaacagggccgatttaggacattaatgggctttcaaaaatattttaggactttgactaacaaaatagataaaagttattaatttatattataataatataatcggtaaactactgattaaaagacataataaggccccaaaaaccaactgtaattaaaatttaaaaccaactcttcagttttaattccggatgacaactacacactacttcttattctaaattaacaatcatttgtcaattatcagcactttctttgttaatattttcaatgcagcaatcacaatcttcaggtgtaattttatattttggacaggccatagtgtttatccattaaggctcaatataattataaacctaacgcctcacattatcattcttttaatttaatcggtagttaaccgatcataatatagattaattacttttatatcttctgttagtccaattgtaattacaaaacctactctttaagttcttaaaaatttagttccggatggcaactactagttcatgttctaatcaacaagcattagtccattatcaacagtttctttgttaatattttcaatgcaacaattgtatggttgttacaaattttaataaggttatgataaactaatagaggaaccaaaaaattaaaaatcttacgtaatttactttaaatccaagggagatgactttaacttatacaaccaataatccccttagtgattataagcctaccacaatggattctatgcttagatgcagaatacaattaagctcctcactgcagctcctcctgcagggcataacccgtcctatcaaccttaccccttagtgtatctttctaagatctcagagttcttattgaatagatgctcagggaccagctcggtgagtctgaaaggtgattctaaaattagaggagaaagagtttgcccatgggttgatctctccagccaatatggctatccctaagatcacataataactctttgcttcttcattctacttgcaaagcttcactatccaaagaatccacttgtttactctctcttttcctcgtcacctgtcaaaccagaaggaattatctgtttagaaactagaacaaaagaaggcagaaaactttgtaaagagagtcataccgacttgttagggaaattttgagcattagtgaactttgaaggagcagaataatgagacttcttttgtagaatctcagagagacgccgctcgtttttctcttgcctaagtagatatctcaaggaaactgattcttgctcaagctttgacaccgtgatttccaatattgctaagctatccaaaagctcctgtgcctgaaaaaaatctctataaagttattaaagaaactcaatagcaaaaacaacaaataagatttttatatgtcggagaaagaggattgagtaccttatcaggaagttcacaaggcgaatccataaacggtgaactagaatgctcaactgcgctagttagagctaaccgtaagttaatctcctcttgtaactgctgctgcaatctcttaatctgtatcatcatcccaaatatcattaaccattaccattagcagtagtagtacaaacttttcagtggtttcttaaatgtgacttagttctataaataagtacgacaaagagaagcaagtgagggatctgagtgacttacatcttgttcaagctcacatttgtaccatagtttggtctttccatcaaatctaccactagtttgatcaatcatcttgctttcctgcttccaaaaaaaaaacaaaaatgcaatttcaaaacctttggcgtgaccataaccccctcaaaaccctagatttactaaatacattccaagaaatcagataagaataaaaggcagagatatatgagagagagaaagaggtacattacatcgagatcaggaaaaaacaaagagccatcaccagaagagtaagatcttctcgagaatgtaccagtcttcttcagatatctccggatcgagcttcccctgtatcagaaaacatcagcaaaccaaaaaaacaaaacaaatcgggagcatagagagaaggaagaagaagtatagatttagagagagtatatataccaattgatgggaagacgaaaagtggcatttccgaaggtgcgatcggtgctaggagaagaagaagaggaagcaaggttttgatcttcatgaagagcttcggctttgatacagagcatcgtttgtcacggagcagagaagaagaagaaagactctgaagaaagaaaggttccaactttgaggtttttttattattgtattgaagacagaagagtttggttgggttctctcactgctcacacttcactctctttcctttttttggtctgtcgcttttatgattttgtaacataaaattataagtagaaaaaagctgaaaagggaaacgaaggaatttattcgtgtctcacacaatttgactaggtgctcctcattttcataatttcattttacacacttttttttttggtcaaacatttacattgtctctatattttctagtagtatattatttaatagaaaaagagaagaaatttcggtttcatattattgcttttcatttcattatattccatttcggtatttatttttccataaattacgaaaaatgcttcatgtgtttttgaggactcaatgtatcatgtgtagggtaaatgatgacgcagataaacaaacagtggaatatctaactttaacatgttctttttctgaatcggactcaaaagaaagacctgattgcaacatatgagtcacacactcacatagagaaaaagattccaatcgtatcaaagagtgaaccgtattatggtttagtcaatttgacacaaaaccggatcaacccaatcgaaccagcctcaatgacaattttgggaccgacttttaaagacgtgtgtctctttattgtcgccgttcaattggtaagaggccacggcgtaatcgtaggacgacgacgaaacatatttttctttagtgtttattttatttttgtgttgggtttcagtttcaaagagtcccaccaatgaccaaaaagtgctccaatgcatgattattacgttggagcctcttcgatagagagatttttgctttctcaatttattattttttgtgtctctctctcgcccgatttggagtttttagggtttgatttttgtaatgtgagaaaggtttcgttatgttaaagaggcactctatcgccattctctccagaatcgcaagcttcgattcccataaaacccttatgtcttcctttaccgatcccctttttctgcgatcgctttactctcctcgatccatcgccatcagatttcatggagattttgctcatagactctacaatcccattcaaatttacaacaacaacaacaacaacagtggctcttgtaatggtttgttcaaggttaaaggtggaggaggaaagccgaaaggattcaccttgcgaagttgttttgattctcataagaaacctgatcaaaaggctcgagctttaactcaacatcgccgctttctccatgatctgggatctgggcctagtgaagaacgcgccgctgccggaactaccgaccttgccgatggccgtggtgcatatctgcgtacgaggtttcaaggaaatgataagattgttgtggctgttgacatagatgagggtatgttcttttagtgtgatgtttacaggtttgaaatgtctttggggagatatcgttttatatgttttgttgacttgttgaactgttgaataggttctagaaaagtttagagtcaaagagtaatataaatcattagctgggaagtagctaaacattctggatggtatgtagagcccatgcaattgggaagatagatccctgatttgagtaaaatatgtctactgattcgaatctgcgtaactatacaattgaatttgctagttttagaccaggaactatgttgaactgtttctttaaaaaggattccttttcatatgatgtgtgttgaatagtttggattctgtttccaactctagtctcagtattgtcttggttagatggctgatgcaaatgtttaagttgctttgttttgccgataccctctattccttttctttcttatattgagatcatatattctgtctcttcattgagccattaatttaagcatgcttcatcatttggtctttttatgtacgcagttcttggaaactttgtctcggcccttaacagattcattgcggaccgctatttgtcgaaccattcagtctcagaataccatgtctatgagttcttcaaggtatgaagtctaagcttcttcttgaacttacatgagaaacaaattttgcctcttcttgctcaacatggaggaatacccttttgcttttagctgctggattgtttagttttctacttctaggacctcacatgcttggttgaatgattaaaatactgagttagcttggaatacgcccttttaggataagtttgtatactaggttgacaatttttagttgctatctttagcttatgataagtaatgttgttctttgcctcacttatatagctcattatactgcctgacacatgtttaccttctatgtaaaagtattttgaaaccccattgcttttagaaatttgagttggtgaggaagttttcgtaaaggtctgctacaatttttctgttacactgatgttttcaagctatcaccaaaacatattaaactcaggagctcctcttgcaatcagggttttgcgttgcctgttacaatacagatctaacgttgctggcttcccattacagatttcttgtttatgatttgcccttaaacttgtgtctttttttttgtggcagatatggaactgctctcgcaacgaaggtattttccctcgcttacttgcaactatgcattaattaagggaccagctgatcgctctaaagaatttttgtgcattcacaactttggtggataaattgagactaatgggatattaactttcttgttctgcagccgacttacgtgttcatgaattctttaagacatcatatttcaagaaagggatccatcctcttccaggtgcccataagactcttcacaagctatcaaaatattgcgacatgtcagttgtgacgtaagtggcttaggttgtgatcttctcgttgttgaacgtttcaaattaccagttagttctataaagtataaaccgtatttgagtggttttaatatcattggataggtcccggcagaatgcgataaaggagcacacacttgagtggatcgagatacatttcccgggactatttaaacagattcattttgggaaccattttgctcttcatggagagtctagaccaaagtctgaaatctgcaggtgcatacaaaatcaactgatgaatctgacacattggcaatattctacttgaaaactaacaaaacaccactttcatatgatttgatgggctaatccaagcattgtaactgcagatcatttggagcagagatattgattgacgataacccaagatatgccgaggaatgcgctaacattggaatgaaggttctcctctttgactatgaaaattcatacccttggtctaagacagagtctgtggatcggcatcctttggtgactagagttcataattgggaagaggtggagcagcagattctctcattggcagtgtcaaagtgttaaatattttctgcaacaagaaatgttattttgccagtgcagaattatagtattgtacaaacttgatgggagaaataagtagcaaacagagatggaattagctttaattgtccctttttagcatcatttcaatctatttttttttataatttagttttgttgttgcaaatacatttgatctgatgtatataaattaaataaagtttttatttcaaattcattttggttttcaagtcagttattctcataggaaaagaataaacagttatattttcatattttgttggttatatttggatcgattagttactaggaaatttcaaatttgatataattacctctgcaaaatgtataaatttacagatgttcaaactaactactaagtcgtatatttactaggaaagtgaccaagatagattattgtttgcttaatagaagtagtcttaactcttaagagatactcggagtaactcaacgtatgtaaaagtcaaaaagaagcagaagacaaatcataaaaagagataattatcatttatttaaagataacgattattcgtaggagcataaacaaacaagtgtttatgtctttaagcacaactaaaacactcttttcacttatttgccttctccttggcatgaagattgtcaaaataagccttagagttggcctcaaaagcagctctagggatctgcgcagaacctccagaaccgggcgcaaccatattgcctgcaccaggagcagtgccactgcttgaaccgctgctctgagctaccgaactagcttttgcgctgacattcttgtccattttacgttttaactcttgaaaatgtgagcttgtttagagtgagtttaagactagattattttttgattggtagtgagaacaaatgtggtggagaggtgggatgattttatagatgagatttgttcaaatgagtcaaattaacaattcccaaggtatcaccattttggtataatatcatatcgtgaagagcaatttagttaattgcaagggaaattggaaaagggcaagtgactgtcttggaaagctacttggaataacgtttagtaattatttttgtttattcactttttaaattactccagtttgtatgctacacatgatcacttactagacatctgacatcaattgatatttgtggacacgacttcttctgtacaacataacatatagtacatataaacatatagatactcgtcacccaaggatcgaggcttatcttcttccttcttcttctttttttgctggtctaatgtctctgtcttcttcagctttgtctccaactccaagttatagagagaaacaatatacagagttctttgatcattctgccttctccatcagctttataccatatgcttgcaatatatccaaagctgtatgtatcacaccacatatcccaaacacacaacaaatcaacatcattgtctttatctgcaacacacatcattacttttgaagcggaattctaatttacctggcaaatacacctctgcttcgagaggccttaagactcctcttgtcttgatcttgtcttcaattaacagctgcaacacacaacatcataaaacatacgcttaaaactttcattttagagaaatatagacaggaaaaagtggtgatcaaagtcttagtaaggaccagagctccaatggctgcagggatcccaacagtcttggccatagcggttgttgtttgtccattcttgatgtccccgaattccaaaagagtcgcagtgtgcttctctatacgtttgctttcaaggaattccacttctacttcgtgatgcaaaagcaccatgtcctgaaaacataatgcaaaagattgtccaaagtttatgtcagtaagtaacaccaaatacaagtgagagaagaaaactaatgctttcacatgaaacagagacctgttcatttccggaataagctagtttctcttccattaggtaacaagttgcatcaaatacgcttttacacagtgatggaacctccctctcttcgttgaaccccaagaatctaagacaccacaaaagaattggggttaggagtttcgtagaagaattggaatcacactgcaacattcagattatatatcttcatggagaagcttacacaattgttttggcagctttggctgcagtctccttggaatgtccaagcttgataattctcttgcttatctcttcttctcccgctaggggctctgattcattgtctgcatccttatttagaatgttacttaaaagagcaccaaacgtaatcctctttccagtggagagtacttgatttgcttcactgtcaaagaatccaagtttcgaaagtgttgccattatcatactaaaccctgtacaagccaaaagaaaacaagtgttaagccttcagatatggagaagtgagtcgtgagttgtgattatggagttcatgccttcatatctgagtgttccacgaaatatcgttgttgcttcgctctcgatgccataatgttccccgtaaaccaaggagtcacgatttggaaaacactccaatgcaaaagctggaagattaggtactcggaatcttgccgcggaatcatagagattcttccctgcgatttacattgctcggttaaacaaaaatgatgtgtagtgaagctaaactactccaacctctcctgcatgtagacatattttgtttttcataccatcaacatgtattatgtcgccgttgcttttgtatttggcggggttttgaccagctcgaattgctccagcagggttccagctgaaaataccgagatgtaattgagtaagcgaaattctgaaaggatgtctaaatgagttaaacaaaacaaaatatgttaatggcgtaaaggactaccgtacctaaatttatatgctaatggattatttgctgcagcaggagagggaagccctccacaataagaggtaaaagacttcactttcccttttttgatatgagcatcgttgatcattttcatcgccatcatgtgatctgaaagattcattgtaggatcaccttctcagttatccgggaaatattttgaagataaatgcacttaagttaaatcaagtgaacaaatgatcttaagagatactatgttgtgagatatcataccgattccagggtccagtcccatttcgcctagaatcgttatcccagcactcttagccttctcatgtaacatggacgtttcatcatcaacatagctagcagtgacgagatgcttcttcagctgagtgaatcagaaagaagaagcagagacatttaggaaccggaaactactgaaagaatgtgttatgcagaggaagtttaacctctatgtcgaataacatttgcaaatttcataacttcactcggaaaacgcattaaacgttaggaatttacctcaatgcatgtctttgctacaacagcatgacaacttgcaggtaataaacttaggacaacatcaacctgcgtgcaatgaaaaaaaaatataagatcatggagaacagtggagtttgaagtaaaggtgatctaagaacagagaagttaggaaaatacctgagaaacatacttaaggagactttcactatcagatacatctagccgaactgcttctacatctgaaataccttcaaccgtctgcggaaaatttgatcatcagtaaaacttgaaaagattgatagttcatcgtatacactgaattactcagatgaagcccaaaggcttctcctacctctttggcatccttaagatacagagacgcgacaatcacatgaacatctgttttctcttcagagtctgctccgaaatatgttttgtaccattgctgtgacgaaatggttctaactgaagctaggaaatcagcagctgggcgacacacacgtccagcaccaagaatcaaaacacctgattttttcgtcatttcaggcttctcttttatctcattttcttgctggactttaccaatcttcagtgagatcttatttgcttctctatgtggggatatataatcttcatttggattagctaaccgagttaatgaatcaatgatttgatccaatactctcttatcatccgcaccaacctaccaagataatgcaagatgggttctttaacaagtgggaataggttaatgtggggccagaatgtttttggcttgtagtttgtttacttgttttaaaaacttacgagacttagtgaaaaggacattgaacctaaacgtgacattaaaaactcttgacagttgttccatgtgaatgattaggttttatccagaaagaaacttacttcaagttctgagtacgattcagcatcagcgctctgccccagttcacatttagccaaatgaaatgagccaccagccgcttcgatcatatcaagagcttcgtttatcagaaacttatcaaataggtgtccgctcagagatacctacaaatgatttgtctcaatcaaaatcatcacaaaatgctgtgacagatgtcgaaaaagtatcaatctttggtcaaaaagttgatagagatatgaatcataagtcttgaactatatattttcttaattcattagcttaaatcatatgattcggaaactagttatatatactttcttcatcaaaactaaccaatatgttgaatgttctctggctggaaaccccgttggcgataatattatcttgtgcctctctgcagttaaagtgggtaaagatgaaaacatagtttagagaagaggcctaaatatttcagatgaagtaacgctcgaagcagaacatactctggatttgacttcctcatacgtggaatatactcatacaaagatgtcaattctcccctatagcttatgcaagccctcttcagatgtgctggtagatctgaaatttcagtcattgaagccaaactaccgacaaatccggaaagaatatctccaaaatgctgggatgcctttttcaggacacaagaactcccactcaatacaaggtttttaactttagatttaatcttaagtactataactgtaaccttcatacatacctcttttgcaaattctgtgggtaaaatgtcaacagccatgcatagtacgccatccccatccatgtcatcgtagtatgaattgttcgagggattaaacctagagatagtgtttagctcgacgagtttcatcatagtaaacgtagatgactcaaaagaaagctcttcctaagtatatattacctgaagaaaggggaatcgattaaagtagctcggttaacaaattcaatggagccaccgatgtcacaagttatatcacatatgcctactagtgggagtcctttttttgttaaatcttgaagctgttttgtgctcagaagacagggaaacctcttctcccagtacatacagtttactgcacagaaagtcataggggttacacactggaactaaccaaaatgagatggtcacagtcacggagtggacagaggatttgcttatatgtaaactcttgagctttaaaggtaaaacagtgatcaggatctaccaagaacagacgtatatggcgatatcttttcgtggaaaactggattgtaatgttccgggtgtgcataatagtcggcctaaacatcataagcttgaagaattaataggtattctactttagcgtagtggaacaaaagtcacagccaaggagctaagaaggtaagtgttactttgtcgaatgactttgatggatctttgtgttcaaccatgtcttggctggtaataatacaaccatatacttgatagactcgctttgttgaaatcccattttgactaattcctttgtcctgtgagaaatatacatttcagaatcttcaaaactctgaaaccaaataaaaagcaaagcgtgacttacttttacaaatagttcaggaagtttgcttggttcaacaaaagtgtgaggaagaagcttgaaaatttcttgcgcccccagagaaactgcggatgagaaattttttaatgagatgaaacatatgcagaaggattcaaagaactcgcagtagaactaaagaagataccatttcctgttccggtgaagacaaatacaagagggcagattcctaatggcagtccctggcttgcaatttcttcaccaacagaaattacagcggcttttgcagcagccaatgaggaatacatatacgatgcaccgagcgagaggaaaggtgttgagtatcctagacttagatatcctgcatcaaacatggaaaattacatctcatcttgttctgcacagaaacatgtcctgatcatcagaattataacatgagcttacgctgtccaagtccgtgtaagaagtcaacaagaccagctctgcctgcatatttaccaaacgccaataatcgtttcccatgatccccaacaatgagctcataatcacacaaagtcactctctcagaaagaatctgcaattggataccccttttgtcaacattcctcagtatcttagataggactaaaaggataaatgaaaagtgtaatactttatccaacaaaggcatgttctctttctgtgccttatgagtatgtgaaaagaaagcgtatgctctctctggaagaatcatttctagctgcaaacagaatcaaatctcataaactgatatatatatagaagaaaaaaaggaactctttttaatgcaaattcccacacctcaggttgtttgattccaagtataagcccacaatcagacaaatcatcagaaatttcacacccaacatcttcatacaaggcatcatgatggatacgcttagcagatggctgaaccacaatgcgggaaatgccggttctgtctttcccaccgtgtaaaaggcgagcgcaatgcgatggcgtcaatggtgttcgtctctcccatttgttaactgtttcagctagaatccccacaactccattccccaacttcttctcctcctcatggccatttgaattcatctttcatgtaaaaacatataatctctgcagatgaacaacaaacccttattttaaacaccctggaatagattcacaaacatttcatatttcgagtttcatcaaccaaacatcaaaaacccaaactttaatgtgaaactgttgaaaatcgaacaaactgggaacagaaatttaacgagttgagaaatagcttttgctcgagcgattaattgaaaactcaaatcagaacagaacagaacagaacagagcagagaggaagagaggaacgcaaattattaaatccaaagtgaaaaaatgaaggcagtgatttagctaaagcgctctccaaatttgcattcctcaagatgggaaaattatggaagaaggaatcaaaacgtacctgatgagtttgatcatgcaatgcctgtgagctggtttgtcaagaaaaaatacaagtttttttttttctttggaattagtgagttttttaggcgcagtaataatctctttccgtcctttttataagctaaattacgtatatgattaatatattgtgggcgtgttagcgaaagattaaattaatataatataatatttcttgttataatgtatgatgtgacaagaattctttttgttaataatgatctgtaatcagctataattattttcccctttcttcaggtaatcatttttgttaataatgatctgtcaaaaaaaaaaaaaaatcctcgtgttcatttttttttgaaacagaacataacttaattaagctctttcgaaaactacttttagttataacttaatgtggctttcacataatggatatgctccgaaactatctaatgcaatagagagacattaattaagtttgttgtatacacgagaacaacgtgagccagccaatgttgtaaaaataatatatatagtatataatgccatagacaataataatgaaatcaaacgaaacaaatgaaataagtatttttactatttaaagaaagcaaaaacaagaaaggaacaagctcttgtttacgtggatggatacttggataggaccgagggaggatcaatccaatcgaaaatgtattacgtgtattcgaagagaaatagacagagatgagtgaagacgtttgctcacgtagctactatatcctcgatgacgacgcttaccagttaccactttccgtgttctctacgtctctctcttctgagactttttttaacattattaactctttaatatgttgggttacgtatatgatgatttcaagttagggatattaatagattcttggatgaaacgcaccgttttactaaaaattcccaagtattatttgcagagagtgggcttgagttgttgtcttaatttggcccaagttccttttgccttggcatttgtaacccaaagaagaatgagaacaagcttcttcaatttaggaattaaggagtgcacaaaggtgacttcaaaatcagtgtgtacgaacaatagtatggcctaaaacgattatgctaccaacagaggatgcatgggccgcggtgggcagacatacgattcaacctcgacaagtgttcttcttatgaaatatctatgggccttacccaataaactatttcaagaaaaaacaatttgaaagtgaaacttgaacattgttttggtatcagttcatcgatatcgctgcaagcttagatttcgttgacggcttttcttttgtttaatttattaggttttcttttaaaagtttaattaaatagacgtagttaattggagatggcctgggaacaagttctgggcattgactttgcaatggcacaaaagtcgagatgcgagaagagattcctcaacgaggctacaaagtaacagtggtcctatccttttgctttttacacccatctctttttttttcatacattttttctcacaaataaagaacttttcttctttcttttttctgctattttttttaacgttgtgcatgtgtaaatctgaaactctctagtaaaacttttctgtaatatcatttgcttacataatttgactatgatttttttggtaaatgaaacatcatgcaacaacctcgagttgaatgtgcatctagaaacatgatgttggatttataaatattcactttcaactcaaccttttaccaaaaaaaataaaaaatatattcactttcaaagtgagagatttcacaaactcaaataaccatagaacaatagcatttgtatgacatgaccacaaaaggttgttgtattcttggatggagaattcaacgccaagtttgacaaaatgataaaagacaaatgtgacttgatgcccaaaaaaaaaagagaaaagagatttgtttgttttatggaattttaatttgatacgtatatatataagagaaacacgagcaaaagaaaaagtagttacttttaatttattattcgaaaggtaaaactgtttaaaataaaaaaagaaaaagaaaaaggaatgaaaaaaaaagaaagaaagaaagaaagaaagaagagaagacaacccacacgaatcgccacttttgaagagagaagagaagagaagaggcagctcctaactttctcttttgcttttgtctccatcttttatttcacacccgtgaccgtgccatctccacactctccgtgcgttaatcctggttttatgatttactttaattctcctgtatgtgaacatcaatggtgaaaaaacttacgccaactaaaaaaggtagctagttagcgttatttcagctaactcaaacaaaagttagttggcctaagtttttctttttgttatttttttagtcaattccctattgaataactccaaaaatgctgtcataaattattatttttgttttatgtacttgtattctgttttgtctcaattatttctccaatcagacaaagaatagcagtttaaagtcaatatttatgttcacaggttatagttttggttttggggatagtagtgaagaagaagttgcacaacacacattctttccctttttacttgtctctctctccccacaagagtatcttctttgtaggggattgtcaacgctcttcgatagaggtgcccaagaagcttctcttctctctctctctctctcttcaatgccctcctctgctactagcacatatctcctctctttaaaacaagtctctctcacagcttcttcaccactccttctccagctcaaagaccgtttctttcaccagccaaagctccttaacatgggattctcaactgggaaaagaaaatcaagagatgaagaagaagatagagtgagcttcttcgcttctgaattccccatggatgacctcaacgatgacgttctcgagagagtcctctcatggctaccaacttcttgcttctttcgtatgagctctgtttgcaaaagatggaaatcaagccaaacctcgaaaagcttcaagcttgcttgctctcaaatccctactcgagatccttggttcttcatgatcgacaacgattccaattcttcctccttcgttttcgactccactgagaactcctggaaaaatctcaaccgccgcgatttcctccaccaccaccgtcaagatttcatccccgtcgcttcttccggcggcttgctctgttaccgctgctccatctccggcgacttcctcctccgtaatccactcactggatcttctcgtgacattccttctcaagataacaacaacaacaaacctctccaagccgtagccatgaccaccactactgttactccctccagctatacgctcgttaccatctccggtgaaatcccaaatctcagtttcaagatctacgaatcaaacgcagattcttggagcaaagaccaagaactggaatcagtcaagaacaatgattcatcattacatgatgattatgatactgacagtggcacagtctactttcttagcaaacaaggaaacgttgtcgtggcgagtaacaatcttcagagaagtccgtcgaagcaatactcttccgttattaccgttacagatgaagccgaaatcgtctattttctcagctcttacggaacaattgtagcttgtgatctcactaaacgatgcttcaccgagctaccaaagcttcttcttccgttcctagagtactccatcgacttggtggaatgtgaaggaacaatgtatgtgattcttctctctgagttctttgaaagcgcaagtttaaggatctggagacttgacaataaccgggaatgggttcaagtcgggatgttgcctcccgcgttgtctcatgagttatacggtaagaaaggcgacataaactgcgttggaggagctggaaacaagatactcgtgtgcttcaatgctagtcctccagaagtgtattgtagatactttgtgtatgatttagttgcagaagagtggaacgagttgccgaaatgcttcaaggatggagaagctgtggattttgtttccgctctttctttccagcctaggatcgaggctacagtttgaaattttttagcttttattgtatggattgtgtgtattctttctattcaggaaaatgcaatgtaacttgatttgtaatctgttgacattggttagaacaggaatgctctgttttatgcaaaaaaatatcaatgctctgttgaaatttagctttactttccagattcaaactaccaataatcaccacatgagcaaataccatccttgaaccggtgaaaccggtttgcatctctaagtacaatctctctattatacacctttgctatatatttcatcgcgttgtgacaatctccacagacgcgtagattcttaatcacacggattggtgtggatggaggagtgctcaaaagtccgaaagcaactgctagcttctcactgtggtagtacagggcacgctctttctcttcttcttccacatctacaagtgtgaaatctgtctcaggaacatacccttcttgtttgatgtctcttatcatgtcttttactttcctgtatatcaactcggtttgccggtttgacctatcatccacgacaaatatatgtatcttgtttttcacctcgatccaactgaaacccgggtcttttttcactttgtgccctttcatcatcgtccgggcaagtttcatctcatcccatttggaagcagcagcatacatattggataaaagaacataagctgatgagtccagtggctctagctccaaaagcttagttgccactctcttccctgtttctgtgtccccttgaactcggcaagctgcaagcaaagttctgtacatcgatgctgaagcttccatggacattgactcgatcaaattttcagcctgtttaacaagtccagcacggccaagcgcatcagccaaacaagagtagtgttctatttcaggtttaatgccatagtctccatgcattgatcgcatatgcttgtatgcctctgataccaagcctgagtgactgcaagcagaaagaacgccgataaatgtgaccttatcaggttttatacccagagatttcatctgtttgaaaagctggagcgtttctttcccttccccatgttgagctaatcccactaacatggcattccaggcagtgatgttcatcatctctattcttttaaacaaacaatatgcatcgtctatgcttccacacttagcatacatgtccacaagtgaagttccaacgaaagggtcattcgtacaattcaacttgagggcatttgcatgaatttggcgcccctgttctaatgccgtcaaacaagagcttgctttcgcaagtgtggctattgtaaattcatcaggcaacactcccatgagcctcatctggctaaaaacatgaaacgctctttcttcttctccattttctatgcatcctgatatcatagtcgtccaagcaacatcgtcaggtacgggaatactatcaaaggcaaattgtgctgcactcatatcgccacattttacatacatatccaaaatcccactgctgacccatagatctaagtcatatccagatttgattgcataagcatggacttgctttccttgatttatggcaaacaagaaaccacatgtcttaaacactgttgcgagcgtgaaatcatcagatctctctccctgtttatgcatcaaagcaaaaagcttcagagtcttatgaccgtcatgactttgggtataaccagccatcatggcattccaagcgacgagatcaaaattatgcctctcaaacaaaatctctgcctctttcatacatctgttccgagagtaggcatcaatcagagcagtagagacaaaactatcagaaacattattgattttaattgcatgaacatgtacttgtttactcaacgacaagccttcaggaagagaagaagcagcctttagaacactcgtcatagtatactggtctggtttgaggccgcaacgtaacagctgcataaacagacacactgcttctacttctaagccattttgagctattccggcaataactgaattccacgaaatcaaatctcgttcactcatattgtcaaatactgtcctagcgaaaccgaattttctcagtttacagtacatgtttattagactattcgaaacagtaagcatcaaatcaagtcctaacttcaatgccatacaatgaacttgctgccctaatgctaaactatctactttaacagctgtagctaacattaaaataaatgtgacttgatcacattccacgtcggactctaccatatccgcaaaacatttgagaagagctgaatactggcctgaatggagatattcactcaatcctttgttcctgaatattatttctgaaacagaagaagcatcattaccatttgcaaaggatttcacttgtcctgcatcagaatcatcacctgaaattctagcaagtaaacgcagagtgatttcattgggatttaaaccacttgaatgaaatgcagaagagaggtctattgcttcttccttaaaacccatttccagataagccttcaacatcaagttccataacaccacatctctataaggcatctcctcaaacaaaaccttaccttccttaaccttaccaaacttcaaatatatgttaacaagagctccggcaacaaattcatcaccgtccaaaccaatcttgcaagcatacccatgaaatgactctgaagcccacacatacccagaatgcaaacaaagtttcaacattggagacagagtcattcgactggtatacacaacgtcctggcgtaatatcctgaaaagaagaaaagcttgttgaatgttctcgacaacgcattcggaagactgagcataggcagctaaaatcgagttccaggaaacaagatctctgtcaggcattttatcgaacactcggcgagcataagtgagtgatccacacttggagtacatggagatgagattgttaatcaggaatcgttctgggttttcctcgaaggttaggatacgtgcgtgtgtacattttccgagcatcaagtccgacgaggtgattgcattccgaagaaagccgaaccattgtgacgaagacgaggaagatgaagacggcgaagcagcagaagtaaaacgcagaggacggagacattgaacaatgagagatgtgtgaaaggagaaagggatggccttggaggttgatcgcatgatcgggttaaaaatgtaaccttttaaagttgagaggtgttatcttgcaaaccaagcaactcatgagatggtaaccggtttttgcgtaatcttgtctccggagattccaattagcatttgaccaaattaattggttcaaaattaaacctaacaaacaagttttcttatttaatcgacgcttagacaaccaattaaagtttatttaatcggcgcctatacaaccaattaatttttccatatgcccgttaacttatattcatgtgctttaaaaggttaaaaatacaactatattttgatcaaaagttaatgtacgtgcctaaaatagtttaaaaaacaactgtagtcgtttgtgcttttggtccaatccttatagcttttatacctctctttaagttgggttaggtatccctttatcggggttgggtcttttaagtttcagtttttaaaaatatttgggcttgacccattttgtaatgttccatcttatgataaaaagtcaataaacagatctttaggcaaaaaaaaagaaaaaaaaactgtacagtagtgaacaataagttacacaacaaatgaaatctcgacccacgcgctgcaggtcctctcaattttaaatttatgaaaaaatccccaaaaaggagggttatagtccacggattatagtctcacgcgctgcaacgcgcatgtgatgcgagtggttttgtatttttaattcctacacgcgtgtagttctatttgaataaacttcaccaatcacaaccataatcgttctatgtttctttttgaataaacacttcggatttcctatatttcggactccaattcggattttcatggctaaggttgtctgaataaattaattcctatgaatttaacacgaaaataaaaatacaactatatatttgctcgtattaaaaacaaaaatatataaaagatttttttaaaaagatagaaaaccccttaaactaatacaatgtacgctcaggcaaccatgaaacacgttttaggctccaaccacctgaaaatctgatcttggcctaagaatattggacatatctaaacacaagttttaagatttgacacgaatttcgacataaataaggctttaaatgggggagatttatcatttgagtatagttttgtttttttggcagctgtaaaaattttgttattatatttttggaattttgttttgagacacaaaaatcgtaaaaacagtttttggattctctaccaaaaaaaaactcctagattttaggaaaacaaaatctttaagaagttgattaggtaataaactgttttttttttaatagtaaatctaagaaccgttgtctttttgtttggttcaacttcaaaaaccattgtaatatctagtttttttacatggactttagaaatcattcttgtacagattcaaggaaaaacaattatcgtgtatattaaagaatggaaacaaatataaaaatcacaccattccttcaacgttacatccctacacattgaatacgattatcttccatattatgatctttttaaaaaaaaagattttgtccatttctcaccctttctcatactctctttttttctcggacaagaaggctacagaaagatatgtcgctgtcgtcttacctcagcccgacgcgccttctagaaggctacctccgccgttgtctcagggcggcaggactgacgtcgcagacgctttccatagactctgaaacaaccatccacttctggggcccaccacctctagaccaccggagcgacgatgacagaccggttatgcttctcctccacggcttcggtccgtcgtccatgtggcagtggcggcgacagatgcaagccttctctccctccgctttcagggtttattctcccgatcttgtcttcttcggcgactctacctcttcctccaccaatcgcaccgaagtcttccaggttttataaacctatgtctctatctctctatttattataagtatatgtttgattccacaattttcccattagatttaccgatgatattattgtttttttaaaacgaaacagaattgagaatgattacgaacgctagcatcatgactcggtgaaaaacaaatcagataaagaaccaaagagcaaaaatatttcagaaatttgtttgttaatttggatttagaataaagtatagtataagaatttcttacaagaaaaagctactatatatatatatatatatatatatatatgttccttttttgttaaatatataatcatttgatttccttgctacaatgctactacatatttttaatatctgaatctcaaaactgtgatcagtatattatgatcaatccttcatgctctctagaaagtatctcaaaagtgaaataagcgatagtcgtgtttaaataaaatatgttttgaactctttttagtattaaaacatatacgtaatataaaacaattaggcggaatgtatggcaaagctaatggcgaaaataggaatagggaagtataatgtggctggaacaagctacggggggtttgttgcgtaccacatggccaaaatgtggccggaaaaagtggagaaagtggtgattgcaagctccggcatcaacatgcgaaagtgtgacggtgaaagtttattgcaaagatccaattgtgagtgcatcgagaaggttatgttaccatccactgcaactgagtttcgcacacttatggctttggcatcttcatggcggttagttcgtatgtttcctgatgctctctggaacgacgtaatcaatgtaagcagctaagtcttgactggtatcttcttcatctacttcttcttcttttggctttagggttaaagaacaattttttgtttaacattttcttctctagcaaactttgaaactaatgtagacttatgcaatgtagaatttgtataaaaagaatagaaaagagaagatagaattgttgaagggagtgactttcggccggagcgaaaatttaaacatcgattctctttctcaggtattattcaaacatcacaacttaaatgcgaaatgttttacgtagtttacttcaacgttaattaataagagtacttaaaatgcgattcatatgatatgatcttaggaggtcctaattgtatggggagacaaagatcagatatttcctgtgaagatggcttacgaattaaaagagtaagtaaaagtatatttttgttcaagttaaattgctccaacaaaatcgaagcataatattaaaatgctagctttaatggatggtatacttgtgtaggattcttggagacaaaacgaaactagaaatcattgacaacacttcacatgttcctcagattgaatgtgctcaagagttcaacaatattgttttgagatttttgaagggttcttaagagccgtaattttattccatgctacatgattcttcagttttttttaagtgttaaactattggttacgtaattttgcgactttacttgccatgctttctcatttttcatgtaagaactttatccattactgtcattgtagagaactctatttatagcaaaaagcaatactaatatgcaacttaattttcgtgatacatgaaaataattaatatgcagatttatgatacaactattggtatgagttagttagaatggagttatgaattgggccaccaatacaatgacacaattaaagtggttcaacgttggtggttgcgaaactgccaaaactataaatcagtctctcaaaagtcaaaaagtatctgttcaattttgtcgacgttaccgagtgaatccctcccggaaatgatgatgtaacaaacatatgtcgttgtctattaacctttgaataaaatctgagagcatttggacaattatgaatctcaaagaatgatgagatctcattacttaaatatttacaaagatgttctaccatttacagtccaaacaaaagagaaaactgacaaagttgcacaactacaaacatttggccattatcatacaatataattctacaactaccaagtctaagcttcaatcgttcaatctcttaaagagaaatttgcaacaccagatcattttccaactctaattgatgcataatcaagttcaatcaaatgatctgctttgaggttgaagctatggagggtttcttcacaagggactgtgcacaagtatattctgatacgaattttggaggttctatttctgatgggtctaatactggaatagccttgtctatatcttctgcagagaaaggaatgctgcacacaacaacaaccaaaaaagagactcataaatgttatgtagataacttgtgaactacatctgagttaagcaagattaacttgattaatgagactcttaatctttcaacaaaaccctagaaatgttaaaagcttttctcaatctacaaggattttcagaacttctcatgccatttacccttcgtcaagagctagagatataacatttctgttactaccatatgaatctatctacctacgtataactacacttcagagtcgagtaacttttgagatatttcatttagatgacacagaaaaaaaacggaagagaataataatacctcatatcatcgtccagcaagaacgaatttgatgtttgtttttggttatccttgtccacaagtaccctcatttgagaaaccacctacagcacaaagatatgtgtaaaggtgtttgaatagacattcaacccaatcaaacctcccagtaataagagtttagacattactcacctcacttgagacactttgagttccatatttatcatcccagtacatcgtacttattcgatatatttgccttatagtcaatacctataacagaattaaatagtgccaagttttcatgagattgtaaaactgcttacagcctggaatcgaatggaacaaaatcggaattcaaacaatatattaacgtactgggcatagatcctgcctgatttcatccaatgatttcttttttttctggtgtataacctaagatgaaattttaaattgcataaaatacaaagcagttaatgcaagctgaactgaaaaaaaagaaagcaaacttttttttatcagagaagaagatgagttttaccaagaatccaacagcttgtcttatgtaatttaactcgtgccaagatgttcctgcaaactgcattcacaaaattttagatcattgatagcatctatataagatgcaaccaacgggtatataacatggtgtacctcctccttcgcattagctatccacttctccaattctgaaatcccagatttcacatattccccatttgaaaatgtgcaacattcacgacgaagaagaagactgaagaagaattcagattatatatgcagaaaacaaaagtaatatgcggtaagtgatacaaaaagaactgaattttggatcacatttacctgttgaaaagtgataggttgatgaatgagaaaacctgagtcacaagtttgcgaatgaagaacgagggtacctatcaatacaatagtctggttataaaaaataaaaatagacatggtacatgagcagtcaaattccttatcctcatatgtggagcaacaggaaaataacaaagtaagtactatatctaagacaataatttagagcaatataatctacataaactcagtagagtgaaagtttctgtggaaaaaaacaagtcatatgaagcagagctggtagaaacgaacagtataattgaaagtatggatgtgcatacatgattttcgcgtaggcgagacatgagagaatccaagaatttgagtatactttcccattgactactcggtgattgctgcggcacaccacctggtgatctagattttccagcaatccctcgtgaagctttcggtgccttgagattcattaatgaaactgtgaatatccaatcaataatctagaaaagcaatatcagtatctacctactttcaaattctcacctgaatgcatgatcccagaagcggtgataattcttttttcaaattatcacgaattaaaccataaatcttctccacacatgctgtcagctgctgtttaaataataatgctggatatcttgcttctatatgcgaagcaccatcatcaggtccatgaagtttaaaaggagactttactccctggtacacaaaaaaacaaaaattagttttactgagggaacgttttacaaaaatactgaaactcaataacgatttcaattccatagaaatgaaacatgcaaactactctctagtctcaattgaactcacatatgcagccctcccagaacgctgagcacttgcatttagaaaactatttgaccgcagatttctctgcaagaggcatagaagtgctgaagcgtttgagagccaatatggtaatacaccgttctcatctccgccctgaaataaacatataaagcaaagacgaaaattattacatgaaagtgttcctatcaatttatttaaggtaatccaatttggaagaaagtagtaacaaaatccctttaaaaaaaaggagattgggtactatatgtcacaacaaaaggatcaccttcagggcttcattgattccctcaataatgatgttaaatatggctgtgctctcagattcaaaggcacgccagtgcagaagacatttgtatattacacaggcagccagtggcttatcatcattgaatcccaaattttcctttatacacctggagagcaattcgtagttctcctgcaatataatggtagcttatgtcaaaattaaatatccactttagccaacaataaaaacgcattatgttactatcactacaggaaaacaaggttcttccatcatagtcaaacaaaattgatagctcaataaaaatccaagtgaatttgtaccaggtttctttctgcggttaatttggatctacgcgactctgacaggctatgtgaaaatggcatgatgtgctttgaaggtgttggtgtctcctgtatatatttataacattagtagagtactcgtttcaagtatttacaaactaggaagatactgaaaagatggagataatgtaacaaatgaagaaaagataaaggtcaaaaaaaaaatgatggcttagttacttacaaatacagatctcctgtcattttgggctggtacaacagcactagagtgtttctgctgggagaaggttataataaacagttagtaaaaagtgaagaccaaagaaatcaggatgacaaattagtgctcaaaaaaaaatgaaagcacatgtttccaagtaattttatctattccataggagctatgctcgaaggaaaccaggaaaacttcaatcaattaacaaacaaggtattggaacacatggttcaaatataaaggaaattcccaggtgcagtacttccgcacatgcatatatcagaaagtgcagcagaaaaagtcaaagatcacatacttcaccaagtatctgtcctattctctctggggatgtaattagcgtcttttgcatcaagacctggttctcgttttccagatgagagagtttctcctcaagactgaataaaaacaattcaaagcaataaacagatgcttgtaggaaaaataaactaggcgtgacttgagaagagaactgcaactacaaacctttgaacactcgtctggagttcagaacaccttttttcagcttccttcaacttctgtagtgtattattgcaattggttttagcattgagaagctccttctcaagaacccgattcttcttttccaaggagttcatcgaattctgtgaataaaaggtgttagcagatacacatgaacaaccaagacgacaagatttgggtctctaaacacagagggaaaacattattaaaaaatcaccaatatgatgctacattgaaaagcagagagcagtgaacaaagaaaagaagaagacaagctgattgaagatgtagtcacttttgagaccattgctcagaatcttttactaccctttcataaacacaatcaatatatatcgaacttcgcattcttccgaacctagatcaagttaaaatagtcgatgggaatttctgtatagccagaaataagaggtgtctatacttcaaactgcagccaccactctttaagcacaaactgagaacaaaggaagagcatacaagcatgaacaaccagtagattaactaaagtatcattgcagttcacctaggggaagaaactcaaagtgtctttatgacgaagaaagctgagatgctattagtacacttccggaaagaagtcctgtatttctacatgcaatatcagattatcaggtgtttcaaaattctatagactttcagcaaagtctttgccaaagagaaaacctaggtaaatatctaacttaaagaaaaattaatgatgtagaacagaacccttaaacgtccctagtcccaaatcctaaaacaacaagctgtttaacatgtgttcaatataaaagaggaaaattaccttcagcaaggcgttatctttttttagttcaaccattccattaagctctctttcaacagcagacttctccttcatggatatgtctagttgcttttcaagtaccgcatttttattgcactcattaatggtagccagcctagctgcgtctagtttgaggctgaaggattccaatgttttctgaagcttggatatttcacttgacttggcctcttcaccacttgtctgtatttaaagcactttgtggttatatactctgtttcaggagatcaatacaatataaatgacaaaaattgacaacatactctcaatcgtttctcaagctgcaaccgccattcaagatcttctaaccgtttttcaagtttcgttttagctaatcgcaaagcacctgcttcattagcaacctgcaagagattgatgtgcatcttcatagtttgagtgataggttaactacttactgaactgaaataatcctgctttagaacataactaaatcatacctgtttaagttttctaaactctctcttcgcaagcttctgtcgccaacgacactgaatagcaataatagatgactgacggtgcctgaatgctgagcgaaacttatggattctccaatgagcctaaaagatttatcatacacaatattaaagcacaaaaaatgagttagagactgaaatcatgaatgagaggaaactagacgactctagattaccctatataagaacttaattcagtaacagaaaaagtcttaatgcacatgtaccatacaaacttggagatcgtataagtacctgaattagagaagcagctcgatgctctttctgatgtgaaaactttaagcgagttgagtcagcacggatgcaagactgtaatacaatggcagctgatacaagttttacaaatgcacatcttgacagccacctgcgcacatgcttttggaccaagacagctgccgccgcattccttctggtggcataagcatttcgagacaggcatccttgccaacagagactattattaggcttagaaataaaacacggataggaaaaaaatacaattgcattaattcaaaagtgacaacgatttgcatgggtgatcatgtgaacatgtttttggcaaaagaaatcaataaaaaaaaatcagagaatagggtgtttgataactgaatatttctcaagaattgataaagactacaaaaatttcgactgcaagagaaaatcacatgtacaatgaaagaagaagaataatagtaaataagaaaggaacctctacagtatgcctgaattgaaattgcagaagcccgtgcagagatgaagttctgatgcgttacaaatgttctcagtcttcgctgaataagtcttgcagaagcatcaaggacttcagcccgcctagagtccaaaatgccaatttgaccagctcttaggaacacttttgtccttcctagctgtgaaagatattccaagtattagcaaatcaattagagtatctaacaagagccatgcaatagcgaaaatcatttggtttctcagcccaccatacctgataattcccaagacctaatttactcaagattttctcagtcagtgcctgctcatcattgctgcatataaattatatattaacaaattactcttgcttgacaataaggattatcccatgcaggacacaagaaattagaaacatgaatgaaatccacgtccagggtatttgtcttgtctggccaaaagctataaataatgcttatgttttctaaataagtcaccttgttttccttaatcacgcggtcagtggtcacagaaaaatgtcaaagaacatttgtacaggtatccaaatttgcaatgacaagtataggacgaataacactctaacaataatcttaggatcatcgatcaataatcgtacctctcatccatgaattctggagctagcagaccaaaacgatccacgaagtctgaataattccttcgagtgggataccctgctagactaatccgaacagcttccagtacaccctatccaaagacatcattaaagttaatagaccaaacaaaggaaatggaagataaggcaagaacatgaaaagactagtacaaccggctgaagtgtaagccaaaatcacttcaattggtgaactataaggacacaatcaggcaatttagaaaatgggtatcgcaaaacatgtactacagcagttaaataagacaatggcctagagacgagaacgctaacattacattttaattacgtcaacgaatgtgcacaacgatagtaataccaacgatgtgtacaaactctatgtttatatagatgaccacgaccaaaaattaatgagcaagaatatgaagtttatagcctgacatgacatacacattctacgacaagaaaagatataagcatgctagaaaaactcgacacacatcaacgttaaatataaaagaacaatggagacaccagactagctacaaaaaagaaacaaatcaaaaagcctctctcattatagaaagaccatgattaccaaggaaaatgagaagatgaattaagatcacgtaatccactaaccccacaacgaagttgatgtaaaacactaagactctcaaacttttgaggtctgttgagtgagtttggcttcacacaccgaacatagtgaggctctgttttgctgagagtttccatgagggcttgaagttgttgctaaaatcaaaattatatgatcagatcgatgattggttttacgctcaatagttcttaatatacacaacttacatgacagaggtccttgcaatgtgaaaaaaaaaatatagctggaaaaattctctaccttaaatctggaagatacagaagaaaatttgtaagaagatctggtagactcctccggggctgaggggaaaattccagcaacaaaagggcatttggaggaagacagcagattgcaatgctccactatagtataatcacggtttttatccaaaaaggcttcagtttgataagtaacctgcagaaatggcgtagcacaaactaattgagatcttaacgaaacaaaataacattaagctatgtcctcgagcaagacttgccttgccagcataatgagagagagtaaaatccgtctctgaaaattttggcttctccaatctcggatgaaatctaaagttctgaaacagcttcattgaaaatgactcatgagttgatctaggaaacatgctgcataaaaggcaaacaaatataagtcagcgagcgaagaaaatacacgtatgtggacaaacaagatgagacaggaatattgtaccaagcttcatctaagagtgcaatcaccccaataggcttctgcagacagcaaaaataataatagtagaattagaagaagatagatcaattttactgtcatgtctgcttgattataacaaagcaaaaacattaaaaaaaggacacaattcttgaggctggcaactacaatagaaaacttgaaaagaagatacactattctatgttatctctgttatcaaagtctaccataccagaatgcaataaaaccattgaccaaaaagggaaatgtctttcacaaaattctatcattcttgcatttatagactgggacctttatcatccatattctatcatgggaatagcaatggcagcttgagtaactttagacacggtaaatgtattggctacattaaccagcccaacgtatgacacagtacaatgtaacattagtgataccgttaatttcaaaactatggagttgagtaatgtcacaggagaaaaattaacattgaaccgctcgaatttttttgagttgacatgattcaacaaatcccctgtttaaagggtggtgaactctttactcgacaatctaagtaaaactataataaataaataaaacgacatgatatattgacaccatgatcaaaatcccatgttaaaggtctgatacaatttaagctgttgcaagtttcaaagatcacaaaaggcgaaggggcaagaaagtagaacagaacaggatctaaaatcttaatctaattaaaatagagagaaacgtaccttctcaataaggtccaagacatcttggttgtcaataaactcgatataactccaattaatttcttcttttctgtactcatcctgctccatcttgaatacatgctgaaaacagaccagagaccataaggagaggaagcaatatactaaatctggcaaaacatttgaaaatgagttccctatattacctcgttgaaatgttgctgcagcttttcatttgcaaagttgatgcaaaattgttcaaaactgcagaatgaatcagcccagataaagtttacacagttcacagctaaacatagtgcaccatatataactaacaaagaattggggctgagaaaggaaagaactatcatttaattagttccatggatcatcgctaacctgttattcttaaaacattcaaagccataaatgtccaggactcctatttgaaaacgagattctggatcttgcccaacagacttattgatcttatcaaccagcctgacagaagcataaaacgaatagttcaaacataagtgtagtacatcaacaaaacatccattaaatgaaaggattaagaaagtcgaaagcaaaccagtcaaatagatgggcgtaaacagtcttcgcgagggtatcccggctagtaacagcagcattagggtcaagtgctttgataatgataccttcacgggtcagaattgaacgtgtgcagagcgaagccagcaaaagatttgcatcacacctgattaattttgcatggatacaacaaaataaacaagctatttcttcgtatgcataattaaaaatgagtactatcagaaaattttatgtacttgaaaagatcagcagccatctgcagatgatgtctagattccggatcctttaccactgaagagtcgtgctctctccctgaggaaaactcaacatttccaagatgtagaatcgcagcaagtgtgcgaaatatcccttcctgataaatgatttgtgcaggaaacaagcaaggaatttcagaagctggcagaagaaaaacatatgaaaattcaattagaagtcgttatacctgctcatcctgacttatgcccacaatatccattgccctccttgtattcttatactcttctgcgctgctgactccttctaattcataggtcttgctttgatttagataatgaaattgacgagggttgcttagtttatatttctcagcgtcctaagcaaaataagaacatttacagattagtaattagcgtaggtaaattgacaaactcagcgagaaaaacctggcgtagctcaatcagataataagaaaaccaaaaccaatctcttatgacatgtatatagagctgtaaaaagaattacattccccgaagcgcacaattgataaaaacaatgataattcctctcggggtctgttatccggacaacacgtgatctctccagaagataggttctgattgcggcaccagatattctaccatttgtgtcaaactggatttcgacaaactttccaaaacggctgaacagcaaaagaagatcagtagattggtcagtagattcgtctaaaagctaggcacacaaaatttcaaccaaaaggtttactaaaaccatatcaacatcataaagtgctgttatcactgggtattaaggatactatcatgaaaaatttgttgacaaatgacataagagcaattaaagatacacctctcaattttcattgaaaaaataaacagaaagaaaaaaaaaaatcaataacccacctggaattatcatttctaactgtttttgcattgccaaatgcttccaagagaggatttgactgcagaacaagaatacttaaattagaatagataactcgcaaataaagaaagtcaaacatgatcacccctaaatatttatctgcaaacaaataccaggggaggaaaacaaaggcatctatccagttctttttttctcattgaacaagatagaagacacaaattttataaccaaaatcttacttcaaggacttgctgctcaacacttctatcatcgtcagtagcacgtcccccaacaaatgtaagatactgcatgattagtttggttgtctcagtttttccagctccactttcaccgctaacaagtattgactgacttcgactgtcgtcaatcattgctctgggttataaagaataactatggttaatagattaacatgactgatagtaagattttaaaaaatcagaaacattagagaaaaaagagtggatcacctgtatgcaacatcagaaactgcaaaaacatgaggactgagctcaccgaatggtgctcccatgtactgttccatcatgtgcccattgtagagatgtggaagctttttgaatggattaacagcgatcagaatgcttccagtgtatgtctgaaaaagaagtcgaacgtatttgtaagaagataatgcagtcatgaatgatttactattggaactgcgtaaaaagctgacagttatgagtggcaaaaagaatgatacaggaattattaccaccaatacttccaactaaatattatcatctcaatggggacataaataaattagacaccaagctgccaccaaatgttttacaaaagggcaagccagctgagtacaaaactgtctaaaaaatagatactttcacctactaaatacggaacagaagctctccataactttagaaggaatattgaacctacaaataattcacagtcacagggcagtccaacaaactaacaaaaagttgttacgaatacacaaggttgattatcccgctcccgccaataatattgttaatattgaaaaaagcaatagttagggttagatcacaagatgtttgaagtgcgattagataccaaataggcaagtaaatgcctgtaatgatatatgcattatgtcacaataaatttcttcacttcgatatctatctttttcggctaaataatatatcaggtcacatctagatgcatccatcataaagaacctgaatccacttcacatggaaacatgtcttacaccacatattaatacacaagaaactccaaaagcaacagtaactcgttctagaggaaaactccggccagtgagtacactaataccactacgaaaatgagtaaacttccatacggaatgaaatccgactcaataaagtacccccggaagtatagaaactaaaaattcaaactccaaatatactcagaaagacctctcaataaacaataccaaagaaaaaaagagtgaaaagaactcacatagatatcattcagagcatatctcctctgtagattataaagaacaccagcttcgtgcaagtatgtcagtttggtcatatcatccactccattatgctcttcatcgtcaggatccctccgaaatagcttttccggggaaacaaaaacctaaaaccccagaaaaaaaatcgcacaacagcaaaaattagcatgaataaagcatgaagaagaggaagaagaagaaacagagctaattcagcagaaataacggttaatcagaccttcttcccagtagaagtttcaacatggagtttgttatcaaaagaatcgaggacatcagcagcaatccaagccaaatccttatcttcgacccaaaccttgtcgcccttgcgcagattcaattccattggaagacaatttctcatgaactcgtgaagagctcgacgagaaaaccctagagaattagattgggggaagcaagagtcatagagagagaaagagagtccgtgaggttgcgccagagaatttttcaaatttcaaaatgaagaagaattgagaaaccctaaggagatagagagagaaggggcgaaattttactactgtggagttttttttttttaaaggttcaaagttacttaaaccgctacccaaaaaagttcccaaaagcaacaaaaaaaaaaaagagcatcaacaacaacaattacttcccgccctctcggattttgcattaaaaaacaaaagaagactagatccaaaacaaaaacacagaagtttttagggataaaaatttacgtcacattccggagtaaatgccaagtttattatctttgattcgaatcatttatagggtttaatccttactcgcaaaattgatttcacattagtaaaacaaactgtgtagttaatttactgacgctaaaaacttgttatttttagtaatttagcaaattaaaaatagtaagtcaaaaatgtagaaggcaatatttgaatataacattcttaaacgatagttagtgaggtttatttatatttattataattactagatctcttttatagagaaaatattccaaaatttgttgtcgattattgttgttgtaatttcatatatggtgatgagagtccaaataagagtttgggggaagaagaagtccaaattattatcatccaatacgcatgagtccaaatttacattccagatttcttccttcattcatattttagactttagtttccaaaaaatatactaaatttttcttaccccctacttattccaaaagttttatttaatttttatctttgttatgtgagtcaatgtggatcaaagcttaaaaggtaaattgataaggtaaatataagatctacatataacagtagcaacaatatcatcaaccacgtacacaaaaaaagtactaatgttgtttaggtttgtgtcatcacacaagcatcctaagaaggccacagtacaaactccagaggcctatatgcactactgaaacttatgacttggagccatttacaacccaaacaccacaccacacaacacattatttctataatctgcagaaaaagttgtatataatcaaacatttggcgcaaaaccctaatcttgcaagagatttggactgctgaaaacgcgtttcaaactagggcacactgttcggaactttgacatgctcaccgaggatatctgttaattcaccaagacaaggttttaattgttacataaaaatggattacttgctaagttttcaatatcgaagttaacactcgtttattgttagtacctttggacagaaacgaagatccaatgtctcgagtgagctgcatcctgatatagccgcttcaactcctgcttcgtccatgttacaagactaccaaagacaaaaggtaccaaagtgtgtttagtggtaacatatagacccaagcttaaggtaccaaagtgtgtttagtggtaaaagttacggagcaaaaacatacctgaagaaagagactagctaatcttggacagccgagcttcaatacttccagagagcaacagttgctagacaattcgaaatggaattagcaatagaataagaccactcatttcatggaagataaagaatataagttatctagcaaatgcaaaagctcaaaccttaaattaagtaaaaccaggttggaacaggtgagatcaacctccttcagattgaccgataacgaaaggttcagtgttgataaatggtaaaagcgagctgcaggtggtatcagcacttttctaatattggggcaacccacacagtttaggttttgcagtaaccgattggctgtttcagctggttcctgggtattgtcactagaactgtagaccccaaagtaatcaaaaagatgtacactggttgaaccccaatccaggtcatgcatgtttacacatccgttcaagctcaaatgggtcaagtgtgtgcagcacgcaagtagatcatctatcgcagtctgacagagagttccatatgacaggtccaactcctcaagtgccggtaaagcaccttctttgtatagaggctccaatgatgagtcagtaagatacttacaggcttgtaatttgagtacctaaacaataaaaagtctcaaagtaagcccaaaagcaatatgaatcatgaatagctgatatacaaagaatgcacacaacaacataactcaagaagttttcattggcaagataatgtatatgctctactgctgacggaaagggaaacatccagcatcatacaagtcttaatgccttaattaccttaagttgaatacaggacttgaagacgggttccaaattcatcaagaaagtgtacgataaatcaagaacagtcaaatttgggagcccgttcaaggaagacaagccatcagagccaatagacgggcatgacattagcaccaatgactcaatgagtgggcaagaagcagtggttgcagacagacagtcatccctcagttgactggaatgggggaaaatgattagcagcacgataatatcagtcacataaatagagaaaaaaacaaaaaaaaaaacaaataattacctgcagaaagacgcatctaaagatgttaataaaggacacataatggatgcttcagacagtacaccacaacctttcaattcaagggacaccatataaggtgcttcgatattgagcacactcaattttgggcatattcctaaatttagagaccgcagagcgacctattcacaacaagaaggaagaagcaagaaatccatcagttaagatatgttggttatttgatatgagaaaagtaacactcacaggttggaagaatgcagtttcaagatgatcacatccatccaaacagatctgctctatgcgagggcacttcaactcaagagaagtaacagcacgacagccaacaagggaaagacttgctagcgatgaattgcagaaccgcactgctgttaaactctacaagatgatcagaaaattataatcaattaaccaaccagcgaaatatcaccaccgccgattttcatttcagtaactgtttcactataaatggaagaaactgtatcacacctcacagttgtcaagaatcaatgacttcagcattgggcatccaccatcatcactaaatattttgcaaacactgttagacaatgattcacaatcagagagatccacttcttgcaaggaatggcattgtagaactaatgtcgtcaaattctcctgtttctgcagggctaatctctgaaatcaaaacaaagaattatcaacaagtttatcagatcaaaattttcagccaaatagaactgcaataacaaaaccatcataactaagtacatactcgaagggcgttggaagtgattgtgatacggcgaagcgctggacagtttgaaacagtgatcgacgaaagcatgatgctttgcaagttcagatctgtaaatctgttaaacacagcgaaaagaagataactgagtgaaataataagaaaggtatgactactcatcacaatatctgcaggttgaaaggaaaccaaagatgaggactatacttgcgacaatggactaggcttatactctgcaaacgcgagagatgcaaagatacagttgtcaacagattgcaattatcaagctccaaaacctgcaacagaatatatgtggttaactcaactggaaacagtggtctctaggtcaaggttgtagaacaatatacatgtgtgtggaaaacggaaaagcaatcacaaacctctagtgcagggctattggcaatccaagtcatagacgcggatgttataccctcacagctatgaagtttgagaactgtcaacatgggaaggtgtactgactgcaaagaggaaagggcacacaagtcagaaatacaagaatgagacagcacgagaggaaagggggtggagaacgttagataacaggaccaacctcaagagatatattggggcagtatgaagcattaagaatatggagattagcacaagcctgggctatttcacgcaaagtttcatcactgacacaggaacagttagaaacgtctagcgactctaattgaggacacgaaatggctgctgaacggatagcagcatccaagagcttatggcacgaggctatatcaagaagttggaggagtggacagttcagcatcgcctgtgacatgttgcttctttttaatgatagagacctgagctgcggacacctaaaagatagaaaaataatgataataattaagaatgagatacacataaatgaatgagaatgaaaatgatttattgaaaataacttcacctgatagacaaacgcataacgcgacattttgtaattttaagttcgcgtagcctatcatgactcaggtgtatttcctgcgctccatttcccagaatagcatcacttacagtcacactccttaacatattacactcccccaatgcctggaaaaagctttcactgatatgaccctttcctattgttaagacctcaagattcctgaaacagatcaaaagcattacgtttgatatataataactaagttatcgaaagcatatccgagggtaaacaagacagatacctcaaagtggtagcggctttcatagccagagcattaacagcaggagcgccataaacattaacttcagtagcatttggatagcgactacacatgttttcaactgcacataaagcacaggaggttatattgtatcccacgtatatttccacaattagcaactgtttttttgttttcctcaaacggcaaataacagaaaagacagatttaatgtatgtatgaagaacaacttacattgttccatagaaatccttatattttcaaagttcaagaccctccagaaatcctcatgagcactagctactctccactgccgacataccatagcagagcgacagaggtcgacatgattcaagaacgagaatacctgaaagaaagaaaatttttaaaaaaacaaaaaaaaggatacttacatgtatttatcttaaaatgcaagaaagaaaaaaagaataccatatgtaagaggtcatcagtcaaatcaatatgaacttcaaaatcttctgtgtctgaagaaccattatcatctccatcatcctttttcccatctttccgattataattcaagatgaaattctggcagaacatatcagtatccgtccgggaagaagaggcaatgccaaaactaacagttctctccaccgacgaaacagaatttccagcatctgaagatacccccgaaactgacctgcactcactgcaattgaacttcatagtcagaaacacatgaaatcagacagacgaataaatgacagattaaggattgatgtcaactaaaatatcactcttgatgacgctgataagccttaaacaaaacaaaaatccaagaaatcgattctacactaaagtaattgaacaaaacagagtttacgaatcatgcatgatacaaaagtaagagagctcacgcaagcccagagtagactttggcacgcttgtgatacgaatcatgatcagcttcctccatcgtacaatcctctgcttctgcaaccacattgctactactctcaccctgaaccaactgattcaagggaatctcagaggtccaaaagcgatccaattcagcccaagcggcttcactttcctcggcacacagcctcagcctccaacgtgggactcttggtgccctctcgttttcaccgaaattaacaaaatcaccatcgccgttactgttatccatggccgttgctaaagattgtttcttcactctgccgccgttatcgtcttcctcgtcttcgtcttcgtcggtgaagcaagaaaaacaccaaatcctcatgcaacccctaagcccacctccccaaaaacgaaatcttgtctctcgatctaccacatttatagaaaacttgctcacaaaaaccagaatttggggaaaagtaacggaattcggaaagcccagatagaattgagaggaaacagaattgaatctctaattctggatttaaagtgacgggaaggagaagatcaaacgctaatctgattcaggattagggtttgagagaaatgaaaaggtagaatcggatcagatcttgcgaggggcgagtagaggcatattgtgaggtttctttggaagaaaaggtggtcgatgatataatctggatgccgattcggaagaagaagcaaaataaaaatcggcgaaaatggaaagggaatgataaaaattaaaaagacaaaactaatcgcgaaacacaagggactttggaagtctttggttcttgcttcaccgttgtttttgttcagaaaggacgatgtaaaaacggtgtcgtttgacaataagtactactgtgtgtaaagtagatagatagatactctgaactctgaatactaggatattataacaatgtttagttcgtacgataaaataatggtttagacacaaccgtttatgtttgggtcaaagttacaaaatttgcgtcacgtgagcagtcgactgaaaatcgaagatagtcaggcgtcagtaggtagaccgagccacaactgtagtatattgtattagcaatttagcatacgtaacgtacaaatacttgttgttttagtattttggtgatgttatcgttttgtgatttaaataaaaaaatttttgtttttattcaatcaaaattctaaatttttttatcaaaatttgatattactagtttaagatttgtaaaaaataatctaaaatcttcataaatctgaagttattggattcatacttttataaaattattttgaaaagtttatattatttaattaaaacaaaataaagtatgattgctaattaattaaaattattgtattattgatttatgactttctaccatttttttgtgttaaattctatcattttcttcacaaaataaaatcatcaaaataaagaaattgattgaaaaagtttcaaaattataaaaaactaatcaacaatattatataaaactctgtgtttaaaataattcatttatttacgttcgatgatattattaaagttaataaagtttgggatcactaatcaaaattcatttccgagtaaaaaacacagacatcacatcactgtaacttttgtaccagcgaaacccacattaatattggggttgtttctctttatggcccaatggctatatcttcgttgtaactaggtcacgtgagccattgacttttcgcccaatatttaagcccatttaaaggcccaatatttaagcaacactcatatacaacatgatgataaaattaaaaccgttgaagtatgtaattaagattgagatgacggtggatgtgtgaaacagctgcttccggtgtgctagtgccccgataggaccaaagctgagaatataattgaatatgtggacggttgagttataattaggagaatctcataaatattattgaaatatcaacgatgaaggaacgcaaatgttgggtgggataatgaagttaagtcccaatattaaagattagactaactgtttagaagtggacagagaggtggttggaatttaatacatctccttcttttataggttccactgactcgagaagatcttcgatatcatcaaaaaccacaaaactttcttttctttttctaactattttatttattattcctacaaaatgtcatgtttgaagtatttcttgatcttattgatgttgggactgtgtgtctccatcggaggagaattttcaatatgactacttgaaagttccggcaagcgagtttgtgagctccataaacacaattgtggtagtgataagacaagtgagttcaattttgtctcagttcgctgatttcagcggagatcgccggctgcagaatgcggtttccgattgccttgatctgcttgacttttcttcagaggagctcacttggtctgcttctgcttctgagaatccaaaaggtaccttaaaggcttaaactctagtttacaacatatatcaatctctctagttttatcacatccttatagagttggaaactttgaatgcataaacctttttttaactctgatcacgaggtcaaaattactgttatgagattaaatcaatacatattttcttgggtgaaatttgaaaagatgataataaccaaatttgagtaatcgacaacttaaattaacaaaaagaaacaaacaaacgggatatagatatgcttattgccggtatatggaaagtaggataaaattgacgtttgtgaaactggttgctatgtttagaaagagtgtgattacttggtatataacttgttgccttttccattccaaccaattaaaagagaaagatttttaaactcagttgtttatattcaaatgccatgatttttgatcaaatgacaaaggaatgtttggtgcccatttaacagttaagcgactcattaatcagtccagatgttcggttgatttatttgtaataattatatatacaaatcagaataatataaaacaattatacatataaatacaaaatgtaatataaaaatttataaatgtttttttttcttcgataaaaaaatttagattataaatgttgtatttttttgctttgataaagattttagattataaatgttatgtacataaaacagcaaaacagcaattactgtatattcttgtaaaacaagatatacgatgcacctgtacaacaaacaactctattggtttggaatttatttagttaaactctccacgactccaataaaagatgatgtaccatgcaaaaatagaataaatgatcgttcatggatcatggtgtatcgtagtaatatatagttatacaagtttatttacatagatatagaaaaagactatttattttgcacttgctgcattaaatttgaaagccggcacaaaattgattgtgatacggttagtaggtggttctttgaccaatcatattagtattatattttcaactaatacaattttgcatcacaattcacaacacaacaatattgaatttcgacctgtattttcttcatttttttttttaatgttatttcagcttagacaaagtgaaataaaagagctgaaacaaaaataaatctgaatatgtgtgctggtgtgcaggctatatatttaaagtaggaaatctatttatatcaaatcattaccaaatgcatgtttttctttgaaaaagcattattcgattgcatatatcagtcaatataaatttagaaaaaaaaattaatgttaatttcaattttaaatgataatgtcaagtgataatgatatgttacatcaacgttgtgcattctcgttagtgaaatgaaagcaaatcctataatcattattgtaaatggcatgtgcgtggtagggacaccgaacatggatttcaaaaaaatcttagatttgtaataaatgtaagtgtgaatatatgaaaatgatagtgttgattgataagaataaaatcacgagtatcatcaagtgattaatataagagaatgcgtgtgatgattttttgaatgggaccaccaaccaggtaagggcaacggaacaggggacgttggatcggacacaaggacatggttaagtgctgctctctccaaccaagccacttgtatggaaggcttcgatggtacctctggtctcgtaaaatcccttgtcgctggtaaattaatcacttcttattgttatcttacaaaattttggttctgtttatccaaaagaagaattaatttataatttgggtgaccatgcaatttcgttagggtttcacgttgataactttcggttcaagtcggtatgatttttcttttttttttaacgttaataatttatcatttcaggcagtctcgatcaactatattctatgcttagggaattgttaccacttgtgcaaccagagcagaaacccaaggctgtttctaaacctggccctattgctaaaggaccgaaggcaccacctggccgtaaactcagagacaccgacgaagacgaaagccttcaattcccagactgggtcagaccggacgatcgtaaactattagaatcaaacggtaggacttacgacgttagtgtagcattggatgggacaggcaacttcacaaagataatggacgccataaagaaagctcctgattatagctcgacacgtttcgtcatatacattaaaaaaggtttatatttggagaatgttgagatcaagaagaagaaatggaacattgtaatgttaggtgatggcattgacgtgactgttatttccggtaaccgcagcttcatcgatggttggaccactttccgatcagctacattcggtaataagattttctagttgttaattcatgttttgataacaattgttttttcttttcttaattctaatggttttgaaacattgtgacacaaaaatttcagcggtaagcggaagaggattcttagcaagagatataacgttccagaacacagcagggccagagaagcatcaggcggtagcactgagatcagactctgacctctctgtgttcttcagatgtgcgatgaggggttatcaagatacactctacacgcacaccatgcgtcagttctaccgtgagtgcaccatcacgggaacagtagattttatatttggggatgggactgttgtgtttcaaaactgtcaaattttggctaaaagaggactccctaaccaaaagaacaccatcactgcacaaggccggaaagatgtcaaccaaccctcaggtacattaacaaaatcataaatagggttccacttttaaggtcttgttagtgtgatagtttcttgtcactcaagaaactatctaaactgaaataattgatctcttgtgaatagtacaaatttacaatcaatctatgtattaaccataatataacgattctaacttggacctttttcaattttgctcaccttcaggattctcaattcaattcagcaatatctcggcggacgcagatttggtcccatacctaaacacgacaaggacgtatctaggaaggccatggaagctatattcgagaacggttttcattaggaacaatatgagcgacgttgtgagacccgaaggatggcttgagtggaacgctgattttgcgttggacacactcttctacggagagttcatgaactacgggcctggttcaggactcagcagccgagtcaaatggcctggttaccacgtctttaacaactcggatcaggctaacaacttcaccgtttctcagttcattaaaggaaatctttggctgccttctacgggagtaacgtttagtgatggcttgtatatctaaactggctcagtgtttctattgtgaatgttcctgttttttgttccttttcattttgttttgcgttttcttgtcatgttcttctaagttggtttgttgtggtatttcacggttttggaaaaatattgataaatggggaatttaagtcgatcggctgaagttgaacaaatcatatattgcccataaaggttaatagattttgtatgttataaagagatcaaaattcaaatcttacatgtttttcgctattattgattaggaatatcattcattaattacgaaaagccttaaaacttgtttcgtgacaaaagatttgagtagaaatcaatctttagaacaaaaaatttaactttgcctcaactaagtttatgttctattatcttgtactccaaggtgcaatttgatctttacccacatcaattcaaaaaaaaaaaaaaaaacaaggcaccaccttacgtgtttattaagcatcgtaaaggccaagcttaaccggagaccctatcgcttggatccattccccttgtaagaatggccccaccgtaaatttcatcgcctcttccttgtttaaaaccctaaatccaggccatttaaccctagcagcggttgctccgcttggaccatcattcttgtattccgcgtaagacaatgtatcgatagcaaaatccgtctcttgccatctcaaccaaccaacaggatcgatcacatcctcgatcgttgattccatcacgactgttcgagaatggggtttccatggccggccgagatagctcttgaactgggcctttacgggtttaagatcttcgtttggagcaactgtacagttgtggatcacaaagcctgtcgtctgaaacttatccactcgtccttgagccgtcaccgtgttcttctgccccggtaaaccttttctgataaagatgtcacagttctggaaaatcgcggccgcatcaccgaagatgaaatcaactgtcccgataatgacacaacttctgtaatattggcggtgagtgtatgcgtataacgtgtcttggtagccttcaaatcgacagttaaggaaaacagatcggtcggattggacacgtattgcgaccgcttggtgtccctctggcccagcagtgttccgaaaccccatggattgtgccatgaatccttctccttgtgccactataagtaaatcaagcacaaatatggttattgcacctcaaattcaagccctaattgtctcttttcgttcgttaacacctagcacaagcactcttaggaaaacaggatataccaaatgttgctgttaggaacgttcgaattttctttgcgtggcttttgtttcccgtcacgatcgtcttctgtgatccatcaccgaccattgtaacattaggtttcttcttatcaataatcacagattcatcataaattccatgtttgatatagatggtgtacctacaaaaacgaaattttactaagcaaagatttggtaatatactatgaaaccaaataattgaagtactgtggtcaaattttaagaccaccactaagctcactctctctttctttcgttactaaaaatttcacatgatggtttccgggcccaagatggataaagggtctcgaggcgggatctattgtttataaaatatgaagaactatgagaatggttagtaccttccttggtacttggcaggcattgctttaagtgcagcgttgatggtagtaaaatttccactgccatctttagccactgtagcattaggtttcaatgctttcacatcaacagcttttaacattcgtctttccttattgcttagccacgacgtaatatgatctgtctctttagcagaagatcttgcttcaagaagaagtcgcgttttaacctttggaaccgaggaaagatatccgtctaaagattttatcatcgcgagtgaattgcttgtcaaaacttgagaagaattgaaattcttacgtatctccgttttgagtttcccttcttcaaatccatcgacacatgtttcttgataagacatgactgcgcttagccaactgtccaaatcgggaactatttttgcaaagttattaacctctgagtcgttgattcttttcatggaggtgccaagttcttctttagcttcatccacaagcaacttacactgggctatagcgtctttgtcatctttgttctctgttttcaggctcaaaacccttttgaatacttggtctagatcgtcattgacagctacaatggcagattttaacaggctcctaggatcagtttgaggagtatctttctttgtctcatttttaagagtattctggcaagttggtttgtagagagtagaattgcaaagtgtttggataatcttatcgacctggccagctttcacagtttgtgctgcggatgatggcggtttcgggctcgggctctcgcttttggtggggctatccttacttttgttgtttgtagttttcccttgttcttgagttttgttttcatatgtaacataagcaaaagcacctccaataatggcagcagcaacaacaagcacggagacgactcctaagatgattctcttcctgaatttacgttttctctctgcatttacgcgttcttgaatcttgtcgaagtcttgaaaagccatttttgcttaaaactttttctctgtctttttgtcactttgagagaagaaaattgaattttcctctgccttagaagcaagctaaggcagggaggttaaaatggaagaagatcagtctttctattttttcttgtgtttatttattttcctctgttttgattgatgcatattgttttgagccaatttcacgccttctaagtttagcttcctatacgaaactaaaatttatgcgttaagacttataagtgatgagtcaaaataagtccctaagattcattcgtttgttcaagtttcacttagggttttttgtttaagtagaaattagagaaacactctaaagttagtttagtccccatgtgtgatgcatttggttgggactatctacaaaattcaagatgtaattttagaactcaatctgatcaaacaacatatttcttcaaggatcccatctttaaacaaacgttcgagaaatttaataaaatgatttgagagcatttgaaagactaaccaagaagaattgttgataaaaacataagttacgacgaataacaaacactaaaagatagaagcagtgtctgtacaattgcatctttcttttattaattctgatgcaaaggcgatggaagaggcatatgccacacttaaggccaagggtaatacataaacacaaattacccaaaagaccattccaaccaaaaaaaataaaaactatatttgctaactgaatattgtgtatgtttgctgaaaatacttcaggacttgttaccaacagcttgaggattgtctttctcttcttcctccttcacctctgctgaagaactgttgcttggcacaaccgcggcaggcgaccactggtcaggaaccatcagaaaataagccgtcatcgctttcctgaatcttttcttgtattgctgcggcgatatcactgtgggagttgagttcttgggtcctccaaggagccctgaagtcttgacccaagtctccagatgtttgtcccaagtgtattgcctcatgaaatcgataattcctagaaccagctcgtttctttcctcatctaccccgactagtaaggagtaatccattacgtgaatcgacttcagccagaaacaaaccaagatcttgcatcagcattactatgtaaagctcaagaacaagttcggtatttcaaagcggtttaaaagaagagtaacaactggaaacttacagcaagaaatgatgtatcattccagactgctctttcaagaagccgttttgccttgctcccaacaaatattggagatgttggcattgcttcgacaagattctgatccagcaaaactgtattgctaccacttgtatcgggattgtaacgagcccgagtggagccttttaggtcataaagcctagtgaagtttcgcttgaacagaagattctccatcaccaagacgtccattttgaactcttttcctcctttaaggtgtttggatgaaacctttaaagatttagcaaagaataacgggtctcgtcaaatgtcaacaaaagagataacaagaaaaattatgttttgagtcgaacaaaagcattctcaattatcatgtagttcagagagattgttagttaagtattttgttatttttcgtacctgatagattcccaagatctttgcaaggcttgtagggcttttagtactgatggactcagtcaggtatttgaagtaagctggcccaaatttgatgaaggactcaagctctgtctttgtaacttgcttgatgataaaacggtcatccaaactttttgcaaagaagacgttgctctttccaccctgggctccccattttctacaacgaccaagagatctaatgaaatctgtttctgaaggacagcaaatcatcctcagggcttcaaactccttagcataataacacgtcacagagtacttcactttcccaggaggaccttcatctgtaaacgaaatcctcgcatgcagatctttcaaatacagtgatgaatgtagcagctgcgagacttgttcatcagcagagctaagacttctactcatgtcgaccgacaaatcactcaaagagttcaatgagagaagattaacagaatcaaaaagtgaaaaggaacctccactatccaagcgatctcttgacttatctgatccagacatctgagctttatattctgatgatgtaagggcataagctatgatactagtaggttcgtcatcataaactggcagtactaagtcattacatcccagaggaagcagcagccttgcaccacttcgccattcaagctctctatatgaagaaacataaacaggccggtcttcagccatgatatgcttgcgagaattaagcgaataattcttgttgagtgaatagtagaaactaggagaaggcaactgaacttgtgttgtatgttcatcattggtagggcctcctttaaagttcagctcactttctgaacccaacagccttaaatcagggatctgagttccatttgttgaagcagctctgctaggcggacggaaaataccattctctgaagtagtttgttcacctatccatgctgcatcaagagtatcagataagtctgttgcttgaaactggctctcggtgtgtgctggtttaaccacctgcgaagactctacaaaattatctttaccaccttcactagggtcgaactccatcctacaatctgggggtctgtctgagcctacatcttcaggaatagcaaatttgccactagtatcagcaaatgatttaccttggttaagacacgtttcgtagtctgcatcctggagaagagagtcattacaaattgcaacatgggtcggtatcgactttactttttcatcactgagcttctctaaggagacgttacgacccataacttttggggctgaattcttcggagcttccaaatagttatttcttaccatattggccgcccctgctaggcattcatcccaagcatatgaatcgaaaattatcagccttcgaagtttatttatcagaaggatatcaatagtaggttgtccatccttaaccacatttaacatttgctgcaatgaatcctgaaaaccagcgacagccttaatcggtattgcatacagagaaaactgaaaaatcatcctacagtgaagaaaggactctaggtacagaggctatgtaaaagactcgttcctataaaggccagcagattatgagacaagcttctacaattatttataagaaaaagttttgactctgtctatattttacacacatgattcgtgagaagtatgaacgtggtgggggtgtgtatgagtgtaggtatgtgtgaatgtgtgtgtagtgtgcaggtgggtgggttctgtctgcgtgagttagagtgagtgtgagtgatgtaatgcgccaaatgcaactctatttcttcttaattctaatggtgtgtaagttacatgacaggctaccttatattcctttttacgttgctcaagaagtcctgcaagttcttcaagagaaagcttgatcttgttgggagtgctgcccttggaacctgcgcccatagttttcgctgaaatttgactaagagcctcctgaacctcattaaaaaggacttccgcttttttaatcacctatagtatacagaccatgacaattaagtaaaataagactcctggctttgttgaatatgtacaaatattcgattaaaaatgtgggaaacttgtaacctcttttgattccttttggagccattcctggttctcatagttaaaataaagctttgctggtggcagagtcactgcgtaaatattgattgaagcatagcggaagcaagcaaccattctcccaaaactgcattaagaaaaatttaagtgatactcattactggcgtggtcatggttgtttaatacaaggccacaaccgtcaaacatagactgacacttgccgtatagatgacaattagagaagtgaatgaccaacactacagtactacttatgcagagcctatctagacagtacatctgatgtaatatatactaagtgctaagcctgattgcattacgcaagatgctacttgagaatcagacatattggacgagggaaaatcagtaatgtgtaataacaagtgaaacaatccgcagaaaatatttatattaggaagcatctatttatacccgtagaaccggagacagtctctgtgaagggaatgaccacagttggccacacgactagccgctgcatggttagaaaagctcagctccaaaaatttgccaaaagacaggccccacgcagcatctgacattacaattctgcgtgtggctggaggaaagccattgatccgaggacatttcaggcaccgatgccacatccaaatcttcccttcacgttgcccaggtagcaattcaggcagtttcttaacagatattgtcagactaccttgcctatgagtataacaatgaatgtgtgcttccgctggcatcgtacatgacgggcagcactgatcctgaacaggagattaatgcaaggaaattaatgcaagcctcagctattaataaccagaggctaattacaacatgataggcttcattaacttttgatcttacaaacttaattatcctggaatctttaaaccatattaatgccatttttctgcttttccttccagtcgttctctttcttaaacttaccctccgactatttcatggattgcttttatgactctaaatacctatttaattacttccacaattattcatgtcaaaaaaatgggaaaaagtgcgtaaccataaaattttaattggattagttggtccacctggttccatcaggagttcagtttcctcaccattggctaaaaggagaatggtgtgctacagattaagagataaaaaaacacacttaaaatgaatggtacctgatcaaagagattatcccttaaaaaccgtcctaaaggcttgtcaaagctcccatagtatttgatacggagtagatgagcccgctcacacacagatcctttccatacgcatcttgttgataaggaaaccaatatactttgatggtcagaagctgacggatgaaagtctccttttgaagattccatttgttcctgtctattaaaattttgatttcctattactgcggagtcattcgtgtaaccaccatctgttacttgttctgtggcaccggataaaacagaccactgatctttttgaacagaaggttcttccacgtgaaatgatagctgcctggattctagagtaggaactaacccatcgtccttagaggtaatagtttctggaggcttacagtaaacagtatccaagttgtgaagcagtctttcagatgggtcaatcctgtcgtttccatccaatttcccttggaaatgagtcttactagaagtgaaattaccagtaaggtcgccattggctttatgtggctcaccccttaactcagtagttggagacttttcagcacttgacacagtaaaaccaggtattgtggatattgatctgttaaccattgatggtttatcaggtaacgccacagtaattggggtctgcagaggaagttcgtgaatggaagcaccttcatctgctaggaaggatgtctcaagagccaagtgatatgctgcaaaaactccatactgaatcacatgtttcaccttctttagctcatcttcatgtgcccccttgagcaatatctgagaaagacagatcaagcaccatacttaagattatttcctgatcagacatacaatatgcatagtcataataacaggtcaaggatctaatgtcttaaaacaccttaaaatgttgtggaacttactgtacaacccaaaggtttcgggcagccatcaaaaaacattaaagtcttggccattttcttcgcaacttgacaaggactaacatgtgtctccacaaacttttccacatggaacaggtcacaataacctagctttggtgatgtgagctggtcgatcgaagggacaatctgcgcaccagtacagcgggatatgcgctctagaagggaccttttaatatttaacacgagagatatgtccttcgcgagaagatattcctgcgcaaaccgcgagacagatttctccaccaagagaatgtcaggattgtgagaatcaattttggcaacagccatcttcaaatggtccatttcctgaaacaccagagatagccttcaataatgcagaaaatttaaccgcctaaacctctgatgtgacagaattatgcttttcctttcctttcagtcgaaggattcatgtccatggttattgggaaaaataaagaagatgagaaacgattcagacctgttgcaacaaagtgtcaaaactagacagctggttagagatgcgctgatactccagagctcctccaaggattagcagacgcggcttctcgatctttgaagtcattcgccgatgagccacatttttcttacaaacaactcctttcacgaccatactaaaaaaataccatcccagttcaatcagtaatacagtgtttaccagccaatcgacagagatataaatcctcacggaatattcacaacaaaaacatgaagctaatatgaaagtagaacagtatgatttcaactagactttatagtgaaactaccaataacggagaacaaggagataaagctccaaatcatcctgtaagctttcggaaaatttagttggcatactttcctcattgggtacagacaaaaaaatgaaaacaaatctaaataaaagtaaccacttttcacttttaacgttcataattggaatctgaatagaagtgttaaacattcgttctgctacatatagaaattgtgagcaatgagattatgataattgatgaaggcaaatccaggaccactgtcattctagttaatcctaaaggagaataaatgaacttgtcaactataatgttattgcgtagaatatcaatagtacagttcacaagcatgaatactatttgaaaacccaaatgtaccactgtatctagaacaaacatcaagcacaataaaaaaaatcccatataaagggttcaaaaaagtcacctctcactgcgacgtccacaagggatgcatttaaccttcacgtatcctcctggatccattcctccacttttacttgtatctggcttgagaagcgttgcagcctcccaagataatgatgtaattatatcaagccagccctcttcatcaccttcgttgaccataggtagattatcaacctccaaaagttgtgctaccaaagccctaaagtgcccttcaacaacatttttcatagcaccactggacttgtccttagagtggaaatccttctcgttaaagctatttgatgggcgaaggtacccccaatcacctctatcaccttcatcaccgtcatcatcagatagcactgcttctctttcatcttcttcgttctctggctctggtggtagccataagagcccatcactctcaaaatcaacaacttcgggctcaaaggactcttcacaaggagggcttccctcctttacatcggtccatccattttcttggtgtctggttttatctatcgtctctgtattcagtgagtcaagatcttgatcagggggaaagccacttatgtttggttctatttttacaccaacgtcatgagcttcatgtgacccatagatatggtctacttcatcgaggttgatggcaccatagtagtcatttccttgagcgtaagattgtgcaaaatcagattgataatcgtcatcgtcatcagcttcaccatcactcctgccactactaatcacgaaaatgagcaactcaactaataaattcaaattgagacaatagtgaatcatttgaaaagacccagtataacacaaacagttggtgatggacatcatgcaaatctcttaagcaatagaagctacccggtcgtttatatatatacacacacaaaaagaaaaaagttacctgttgacaaagaattcaacttgattatcagaagaatctaacacatgcccataatgatctgagctcctacgcgattttgcattctgctgctcagacttttcagaatccatgtttgacgagacacgacggctagctcggggattcattttgggtctaggggaaggtccagcagttgaatcaatggtgcagttgctactattagaggtagtacttgcgacgcttctagcagaaggcgatgaactaaaatgaaggctaataatagaagccccattatcagggggaactatcccctgttcccactgtttgtagcagtaattacacaccctaatcctttctggttcctcatgactatcctttgtttcatctgatggagatggaatggaatttgcagcgcatttggcacaaaaaactcgaccacaaaggcggcaatgatgtcttcgattaaacacagtgaactgagcatcacactcataacacacaggacagctttggtcaggcatccaaaaatccctcgacatatttgaggactcactctttctagggatccaagatttgactatgtcaacaaagccaggtgctttgtgatcttgtgagtccatttattgaatctccccaacaacaaggagagtcatcgtgaaaaacccatttgcttaatcgcattaagtctaatccttgatccctgaagatgaatggtaaccacgaaaatcaacataaacttctcttaaaagaagaaaggagcttgagagagagagagagagatgttaatggattttacctggaataagatacctccgagattcagaccaaagtcactgggtcactctcaaacttcaaaatccagaatttatgcttgattcaagatcaaaagatctcaaatttcaatcttccaagctcgaattc

SEQ ID NO: 662 - DNA, 96475 bp, Arabidopsis thaliana
agaattcaacttgattatcagaagaatctaacacatgcccataatgatctgagctcctacgcgattttgcattctgctgctcagacttttcagaatccatgtttgacgagacacgacggctagctcggggattcattttgggtctaggggaaggtccagcagttgaatcaatggtgcagttgctactattagaggtagtacttgcgacgcttctagcagaaggcgatgaactaaaatgaaggctaataatagaagccccattatcagggggaactatcccctgttcccactgtttgtagcagtaattacacaccctaatcctttctggttcctcatgactatcctttgtttcatctgatggagatggaatggaatttgcagcgcatttggcacaaaaaactcgaccacaaaggcggcaatgatgtcttcgattaaacacagtgaactgagcatcacactcataacacacaggacagctttggtcaggcatccaaaaatccctcgacatatttgaggactcactctttctagggatccaagatttgactatgtcaacaaagccaggtgctttgtgatcttgtgagtccatttattgaatctccccaacaacaaggagagtcatcgtgaaaaacccatttgcttaatcgcattaagtctaatccttgatccctgaagatgaatggtaaccacgaaaatcaacataaacttctcttaaaagaagaaaggagcttgagagagagagagagagatgttaatggattttacctggaataagatacctccgagattcagaccaaagtcactgggtcactctcaaacttcaaaatccagaatttatgcttgattcaagatcaaaagatctcaaatttcaatcttccaagctcgaattcttctgttgtgaccccagaaaacgagcaactctcgctgtcaggaaactccaaatgcgaaaactaacacgagcaagaaacgaattttttaatagaaaacaaaataagaaacaaaaattaaacacggaaactctagaaaatttgtttaaaaacagaaggcaccaaatttcttctggataagatttgaaatcaatttccaaaagggaaccaattaaccataatctcaaagaaaagtgccaagctgagaacatagaaaggggaaaacagttttcctcaatttctctcagattaatacccaacaaagaaagaaaaaaaagccacctttgaaattgaagaaatacaagagagagacggtaagaagatttacataaacgaagatttgcagtttcttttttggtgctcgtctggctttcttttgtttttcctgtctctcccgtttttatgttcacgacttgtctgtctgatcgtttgcctttgtttatttcactttttattcacgtatttatcacccttctttatatcctccacgtatcttaattaaatctaacttgttcacttcaatcacatattgtatcttcattagtcttcattatgtcgactaaataaaatagaaaaaacaaatcattaggttcatgattgtcaaaaaaacaattataaataaaacaccgttcattgttgtcgatcaaattgaaaatttatatattatattcataaaattcaattatttattctgttaagcaattcaaaaaagtctcatatatgtacaaaattacaaaactagttacatcaaaatcaaaagttatgatcttgggaataacctagttgttagtagaataatagtattgttttaagcaatcatcttagatacgagatgatctaactaattatagtttaatcagtcaaatttatcacatagggagcagtcaaaatatgcatgggaaaagagaaaattgtgcacgtgacatgatttggtgtcaacatgtgagcttccaaatggatggctgtcaatcttcgtatgtgatctgtgtagagaggacgacaagacatagacagtctctttgtatttcaaactttctcaatacaaatttgccgtgtcagtttctatattccaagaaacctaaacaaaagttttttttttcctttgctttttaaagaagacaattgtttgggttgtctgaagattcgtttagtttatttagatgtaatgaagtaaacagaagataatcaatcagaaacgagccaattccaacacttgttgagaaaccagtattggaatccatggaaggtaaaaaaaaaggtaagaagcagagctcagactatgaagatctactaattatggcaaagtctcggtctactagatttttaagaaaatctgtcaaattgcaaagaggaaggccattgccaaaattcacattacggtgtcttaaaagtgtacatcacaagataacaagagacaaaaggaaaatttgcagtgttctcatgaattggttcaaccaaggatggggaagatgcgggcaatgtgttccaagggaacattctcacctgtatttttcttgagctccggatggttaaattcattttgtggtaagacaatacttccaccctctttctcaacaatccatccactgttagtcacttgctgctcgatgaatttgtctagagatgcaccatccatgttaacagcctgtgaaaattgtcatttattgacaaataaaaggtcaacaaattagatttccagaactatgatgtggaatattcgtaacagaaaattatatgagaaagtaaaagatttcacatccgaagttctactattttgatgacttaagctatccgtggtgaaaacgagatcataaaccaaacatcatacctcagccagcactgatcttggaaccttttggtagcttaagctaagaaggtgacttgcatatgcttgaatagcttgctcaaaacctgcatttaatctctcgcatataagacatctacactagacacaatcataaaatgaatagacagtaccataaaccactactgaggactttgttcgtaccataagacatctacacacaaatatccttaagtaacaaatctacatctagaaatttgttattagtagacgatttatttatgattcagaagttagttacctggaacagcctcgagaatgtgacggttcttggcagcttcatcccagaactgttggaacctcccagtctgcaaaagaaaaacaagtgctttaaatactcaatgcacaccttttcaactctcaactaactaatactgatgtttgcgtacctcaaggtagtgtgatagaacaattagtgacttgaactgctcctccatttgctgaaacacacaatccaaacaagtacatttattagtcctcaagaatccaacacattgaaactcacactttatcatgaatgctcagtacacagactgaactgacagaaataacttggaatggcataataacttgagtcagaaacatttgaacaatcgtttcttctgtatctacgataagctatatatgtaagaaagcaaaacattgtgaagttaagaggaaagaagaataccactctttcgggaatcaagaagaggcaaaggctgaagtctggagttggcatagccataagagccttgaccaagattcgagccacgatatgagtgttcatgcgctcaggctcaaactgcataaaagcaacaataccaattaacgaaaagagacactaaaactcttgaatttggtatcaaaaggtccagcttaagaacaactagagcacctgatagagccgaagcaagcataggtttacttccagactatacgtttgcgatgtaacctgaaaatcataacgaaaccaacaacaatcaatggaacacgatttctacaacagaatccggcttgagagaaaagggaaaggaaactgcacgttaacgtagttttcgagatcaggcaggatttcagggttgaaaggattaagggcgacgagctgctcaacggtgtaagagctctgttcctgcggcgattggatctctactcccatctctgcctctttctccttctccgtttctgtcccttttgcgtcggtctcttcgaactttgatagatcactgaggaatgtgcagaggagattcgctgataagacgaatctagggtttaaaagccaaaacgacaaagctttgtcgtttgggctaatggtgcaattgacaaaacgtttgggttaaattaggatgacagagaaactacaaagggttgtttagtaaataactatttttaagccattttgatgccacagactcggtaaataaatattttctcagtttgcttttaaagattgatactacactagagtttgcattcgattaaccatggtccaaaagttcaccagtgaacatcttttcaaacaaaactgtcagcatctacgagttctctgatcacaacttcatgaagtctcactttgtttccagtagaataataaatgtggatatccttcaagagtataaaatcataatctttcttttttcaaatttcaatatatacaagtaatctttatattcacgaagaatgaatcctttggtaataaaataaaaataaaaatatatagtttctttttgtaacaatcaatgggttttccttgttgttttagtcttcaacagcttcatcgaatacgattcacatgagaaaatggctcggcaactgcttttggtgcagctttttttgcagtctctggtactccaaaaacgttccaaaacctcagggtctcgtctcctgctgctgaagctacagtacaaccatctggactctgtagaaaacacaacaaacaacacaagtttaaggactgaatgacctcaaagactcaaactacttcaccacttaaagaaattgatgacgttacctgggccatatatagaactcttgatgtatgaccagtgagctcagccattttcaccatggatgggtacttccaaagtgtaagctgattctgtgtaaacccatgtgagctaagcaactctctttcattcttgctccataacaacgaacaaacttgggaaccagtgtctactgaattcaagcaagccccagtgtgagtattccagaactttatcgtcctgtctcctccaccaccaccagttgcaagcaaattcgcttggaaagggcaccacgcaagagccttcacagcagatgtatgttcctcaagcctgtgcagccattgtgtggttgagtttgaggaagcgacagaacgatcccagatgtgtaccacattgtcgttgccaccacttgctagttgttgtccagatcctgaccacttgagcccacaaacttcttgagtgtgacctctgtaagtttccacaatgggtgatctgatcctcacatcattgttgatgatcagtccatccattcctccagtagtaaggatatgattgttccatgccagtgatcctactcttgactggtgaccaccctttaatgttctcagctgcagaaatatgagaaacacatcagactaagaacaccggatattatatctcaacataaaagagagagagtagtaattacttgacggttggatgcagaatcccacagctggacttcagagttgttgagtccaactgcaacatgacgaccatcaggagcccagttgatacttgtgacaggtcccttctcctcatcaatggtcacaagctcagatgtagaaccagtggaagcatcccacaagtagacagtgtggtccaacgctatggctaagacatttgcacttccccagtccagcaagttgaggtagaaatcgtcaacaatgtcaggtgcatccaaggttctctcagaagtctgttaatcacaacagaaagtttagcaacagatcaatacaactctaatgcagcaaccagtaagtgagctttaaggatcaaacgcaataaatacagtacatacctgaggaatgtatcgacgaggctttacagatttgggttgttggtgaagagaagcagagtgattgctcggaagcagttcgacaggagcctgaggtttgtttctgaaggcgagaatccttgtgtggttcaagttcatggtctcagccaattgcttcctgtaggcctctttggatggtgaacttaccgttgcagattgatccttaccttttctttcttcagtgagggcaaagtgagcatagtcaaaattcatcgctgatctattcggtatgaacctgtccagctggtagaagataaaagcaaatcagtacaattcattcgatatcacaaatccaatttatgcaagaaacaatcaatcaattggaaagacatgatttttcttataacaaaaccaacaattcgttcatacagtatctgaataaagattcatcaatgatatgggtcaaacaattttggattcagatgaacaagttgttaatcaaaacactaattctgtatcataaacatggtattgaatctgaaaaattaaagagcacccacacaattcgaatcctgattctcaacagagtacggaaacaggtcaaatctgaatgattgaagaaggatacttacattttccttggaattttttctgggaagaaagtgttcttgaagtgggcaccgattcaaacctgcatccattatcactaaacacaaagaaaatcccaaaatacaaacaaacagaaaacaagaatagcgatagtatacgaaacggattagaagatataatgagtaaacgaaattagataaagatgagcctgcagagaagggatcgttagtaaattcgagcagagagatcagagcagagagagcgaagaattgttggtggctgatgattgatgagagatgagagagcagattgatgaagtgagtgaaaaggtacgaaattttgggttgcttataaaggggtagagccaatttagggttttggaggactctaatttctataatcggaaagtcggtaacggctatatttctgagagagccgttgatcaattacggaaaatgccctctttccctgaaacaattagcttttttatgtctcattttaacatttgtctattagacaaaaacagagacatgtaacaaaaataaaaaaacattaaaatacttatagatattatacaaaacaaataaaacactgcttaccactcactcaaaaaagatactgaaataactattggtacaaaaaagaggttaacactcacataaataccacaattacctttaatctagaattattactgaaaaaaaacaaatacaatagtgaaaaagtttcatacggtaaatagaccataataacaatttatcatctacctaataccatccaaaattagtttcaaattgtatacgagaaccatccaacgtatttcgatgtatggtccttgtaaataataatttttgtattaacctcgataatatttggttaggttattgtgtgattgaatatttgctttatggttaaataatggttattgtgtgatcggtatttttcacctataatattgttttagtattattttaatcatataaaaaatttatatccaaaaaaagcatttgttaatcaattcattaacctgaaaacataacaagtggtttaaaaacataaaaccaaaatcttctaaaatccctgaaattacataagctagcggaaaaaataaaatcttccaaaatccctaatcgaacacatgtttctacacactaatgtgattaggttagtgtggtttcaatgtctattttgatgtagttacaattatcatcttacagtttacagtacttaatgctcctgcttcttgtatcatctgacatatataatcaagatctttctttctattcaaatgcaagcaaataagtttgactcaacaatatatatcatttacatatatataattgtacaatatgcacttttcttgtcactacaattcatgaagaatgaatcagatgcaaaaaaaatgaatattttgcatctgtatcatgggtttccttgtccgtcagtcttcacagcttcaacgaatacgattcacgtgagaaaatggctcggaaactgcttttggagcagcttttttggcggtctctggtactccaaaaacattccagaacctcagagtctcatctcctgctgctgaagctacggtacaaccatctggactctgtaagaaatacaacacaaacaacacaagttttaggactaaagacctcaaacatctccaactactttcaacagttaaaaattgatttagttgttttcctttacctgggccatatatagaactcttgatgtatgaccagtgagctcagccattttcaccatggatggatacttccaaagtgtgagctgattctgtgtaaacccgtgtgagctaagcaactctctttcattcttgctccataacaacgaacaaacttgggaaccagtgtctactgaattcaagcaagccccagtgtgagtattccagaacttgatcgtcctgtctcctccaccaccaccagttgcaagcaaattcgcttggaaagggcaccacgcaagagccttcacagcagatgtatgttcctcaagcctgtgcagccattgtgtggttgagtttgaggaagcgacagaacgatcccagatgtgtaccacattgtcgttgccaccacttgctagttgttgtccagatcctgaccacttgagcccacaaacttcttgagtgtgacctctgtaagtttccacaatgggtgatctgatcctcacatcattgttgatgatcagtccatccattcctccagtagtaaggatgtgattgttccatgccagtgatcctactcgtgactggtgaccacccttcaatgttctcagctgcaagtatatgataaaacacatgagactaagaacaccggatattatatctcaacataaaagagagagagtagtaattacttgacggttggatgcagaatcccacagctggacttcagagttgttgagtccaactgcaacatgacgaccatcaggagcccagttgatacttgtgacaggtcccttctcctcatcaatggtcacaagctcagatgtagaaccagtggaagcatcccacaagtagacagtgtggtccaacgctatggctaagacatttgcacttccccagtccagcaagttgaggtagaaatcgtcaacaatgtcaggtgcatccaaggtcctctcagaagtctgttaatcacaacagaaagtttagcaacagatcaatacaactcaaaagcagcaaccagtaagtgagctttaaggatcaaacgcattaaatacagtacatacctgaggaatgtatcgacgaggctttacagatttgggctgttggtgaagagaagcagagtgattgctgggaagcagttcgacaggagcctgaggtttgtttctgaaggcgagaatccttgtgtggttcaagttcatggtctcagccaattgcttcctgtaggcctctttggatggtgaacttaccgctgcagtctgatccttaccttttcttccttcagtgagggcaaagtgagcatagtcaaaattcatcgctgatctgttcggtatgaacctgtccagctggtggaagagaaaagcaaggcaatcagtacaacgtattcaatatcacaaatcaaatctatgcaagaaacaaccaatcaattgaaaagacatgatttttcttaaccaacagaatcaacaattgtttaatctagtatccaaatcaaggggaagtttatgggacagacaaatgttaatgcaaaaagaagaacaacccacaaatcgaaatccctaatttgtcagaaaggaatcacttttaacgatcctgacgaattaaccagctaatgaaaaccctaatttttaaatagaagaactgaatcctataatgataatcgattctgatgaaaactaataaagagcaccggcaaatcgaaaccctaattcttaatgacagaattagacttacgttttccttagaaggtttcctgggaagaaagtgttcttgaagagggcaacgagcctgcgtcttgtagtgagaagaagtgttgttcatacctgcatccattatcaccaaacaaaaacaagaaaacagagcaaaacacacaaaagcgatgataaaagaaacgaatattaaaagatctagaagattaaacgaaatcagacaaatacgaatcaaataaagctagcgaagagggaatcgttccgagcagagagagagcgagtgatgaatttcgtcgcagatgatgagaatcgagagtagattgggtgatcgagaatgtacgaaattagggatcttataaagcagtggagtcaatttttagggtttgctctaaatcttacaattggaaactgtaacggctatatttcggagagagacgttgtaaaatttggttttacggtaatgcccctggcgctaatgtacactcttcgtttatttgcggaataaatctgcaattcttaggctaagtatagcaacagatcagaccaattttacacacagactagtaaatactaataaaattactggttatactcctctcaaatcttacaaaccaaagcaaaaaaacacttggtattacttatatgatttaacaagactaaaccaaaagacaaaaaaagagttggtttaaatattgtggcaagccccaacacaagaaaataggcattaccagaaccagaagagttccgttatatgcacccaaaaaaaagaggcatcgtgagtgagagatagattacacacattcttacgtttacctttatatacaagttttcatctacgctacatatactttacactacagggttgaggaaaacgttgtagccttgcttagttattcacttattgtgtaaaccgggtcaacattgttggttctttccgtttcttcaccacggaatatatagacattgagatgaagcggttttgtttcagaattggctggctcaaacacacagacatcaccttcgcgcaagttgttgtcttgtacaaatttcttccacccggttgaaatcccaccactaccacgagctccgaaaatgttaaacttcatctcccatttcgtttgatccacctgcatcaccacttcttgacgtgtgataagcatgttcttcacgcaccatttgtatgggattgtctgtatcaaaagaaaaatgtgacctcttctatttttttcaataatcgaagcttcaaggactatacacaaagcgatgcaaaagtcttaccagaaaacactttgataccacatgagagcgtttcatgaacaccaagaaaccatccggcgaaatggctctcttggccagagataaggctttcttattgcttccagctgaaatcatctccacgtcttacgacagttgataaggtatattagtattttagatgcatgataaatgagatagaaactgataaatatatggactcactccattatataaagttataaactttgaagacaaatggatcaaagcctatgggtagtaagaagttaataaagtttcggaacaagaaactttctctactgaatgagaaagatgagacaattctataatctccacacctaatatccagaatcatataatatccaagactaaggaatcagttactccaagctgttagcaacattctcaaaacctgaaactttaatcccaacagttgcatgcaaaacagagtctacagagtacagacagggcttatcagatgaataccaagaaacaagtgcactgtgtaatcactaagtaagaagattttcataccagctttttgatcgagattgtcattacttaattctcttcgcatcttcttaaaaccgctaaggggatacttcccttcactgactcgtactgtactagttggagatataacaggaagctgggcagatgctgtatcaatgtcagagttaatatgttcttcttgctcataaccggtgtgagatgctacaagaagcggatttagtattttatcaatatcaaaatcaagatcaatgtcaatgaggtcttctagctcattatcaactggaggagatataacaagttgctggtttggtgtagtttcaacatcatcagggttaaagtgtctcttaggagacctcgaagaggttgcattaaaatcaataatacctttagtcttctctgcatgcccacatttcctgacgaaataagaagtaggtttctcacataaagtctgtccatcgaaaacaagcacttcaaactcagacactccatggaacttgaagaccaatagatcattctcctctagcgaatgatctttcacaaacttgtcccacccaaaacgaaaagccattgtcttttcatcatcttcctctactcccacattatatgtaacgccacttggacttttgagagtcacaatctgaggcagcttccttttgcagtgtgttgaaaactttcgaggtatgacctgtaataaattgcaaaaagtggtaatttttatgctagaattggcaatcttaggactcttaaatccgcaaagaactgattttgagagaaaaaaacaaaaattgcttaaacccctttgatacatttgagtgtaaatctccaaattaaaagccggtggaaaacaaaggaaagtgaatacatgaagaaattgaaagagtaacatgaattgctgataaagatgcatgaagaagaaggttcttagagaaagtgatagagacatacgaggcgattgtggaaaccaggaaggaggagctgagtgaaatggagagtttgaaaatgagtccagtagagttcttcttcccatttcatgcaatcctcgcaattctcttccatcttctctcttcctctccctgctcttgccaccgagatacttgtatgttgagaattgagatgaaactggagttattgggttgacaccaaaatatcattaaaagaccgactacattctgaagcccactatcggcccagatttgtttagggcttttgtatcttcaactgttatatatggtgtacacttgaggaaaacaaaaagcgtttttttgaatgtaaatagtcaaacccttgttgcaatttgaaactaatgacgacgtcgacgatgatcaccgatcttccaaaggatttgatagaagaaatcctttcaagggtttccatgacatctatgagagttgtgcgattaacttgcaaaagttggaatactttatccaatagtgagagctttaagaagatgcacattggtaaagttacatcaacgagagaaggagaatctagggtgatcatgttgatagattacaatctttttttgatgagcgctgtcctcatggatgacgttgatccatctatagagtttaaaggtaaacttagttgtcttaaggaacaagtcaagatatctcaagtctttcactgtgagggtttattgttatgcatcttgaaagacgatactaggattgttgtttggaatccgtataggcaggaaacaaggtggatcatacctagatattctcaccgtccatacgtaatgaacaatatcagatatgctcttggatacgagaataataaatctggtcgtagccttaaattattgaggtttatagattattgctacaccgaaaagcacatttgttggcatgaaatctacgattttgactctgatttatggacaactcttgatgtcactccacattggtatatattgtctaattggtcttgtgtccaaggcgtctctctcaaagggaacacttactggtgtgctagagaagaaaactcagatggttacaatcatataatctgttttgattttacaagagagagatttggtccgcttctgcctctaccggttaacgttatagataatgaatatgaatatgtgacttcatcttgtgttagagaagggaagattgcggctttatttcagcacaacgattcatatccatatgagcttgagatatggattacgactaagattgaggcggaaatggtgtcgtggaacaagttcttgagaattgacattgaacctaacaataacataatggttccatttatatatgggggtttcttcattgacgaggagaagaagaaagtcgccttggggtttgatgaagagttcggtcgcaaaacatttaacattattggagaggatggatattttagagaattcgatcgcataacatttaacattattgaagaggctggagaacgtgcaggcgtaaactgtggttcatatgtgtgctcttatgttccaagtttggtccgaattaagaaacctgcacaaggcaaaaggaaaagacaaagcagtttagaaaagcttcgatttgatcaaaacacgtggatatttgacagcatttatcaagccactgccagtcaaatacgtaggaggaggccaacaagatgattattagtctcagattacaaagcctaatttattatgttacaattcagaataacaaagaaatctatctcttgtcttttagtattctttattttggcatctttgtcgaggaatttggaacagaatcagctttgtttcacaaatcttttcagtttctaaactttcatgtagaaaagagagagtagaagtttgttatgaaaagttatcctttattgaacttagaaattagaaaacagagtagaaagagttctctatacaagccatttaacttaccagactctaaacaatgagtttacactttattcgtcaagccagtctaggctgaagcatttctcagcagcttcgatctttaaccctggaacagccttctcaacttcttcccacataaatgcaacgtcggtatcgcagattacatggcgcagagacttcagtgaaacagcagagctcggtctatccgagaagcaacattctctcatgtcgatcttctcaagcttctttagctttcctatttcctctggaagacaactcaggctgacacattgtgagatgtcgagatacttaagcccaggaagctcacatatttctccaggtaatgtctttagctcagggcaagcatatagccttaagatttcgagagcttgtagcttactgaggttcttgggcaattcaccgaggcgtggacaatttgttatgcttaagcagctaagggaggtcagtccgcaaatgcttgaaggtagtgccacgagatcatcacagtgatctattgtcagatcgcccaattttgggaagatatctgccacgtcaagtccggtttgatcaaaacttttattgatcttgcacagaatcaaagacatcttgtggagatttttcaagggggtggttgagttggagagttgagggacgtgaaccctctctagccagagacttcttagtttcgacaaatgagcaaatattgaaaagtcatggagaaccgcgggagacatgccgttgttgataatcactaggaccttaagccggctcatcttactgataaaaggcggaagaacatacttgtctgaagagaagttcaatattagaatctctgccttggggaactccatgtcaaaccattgcatttcattcatttcccctgcaaaaaacaaaataaaaaatccataccaacattatgatcctggtgattattacatgagagaaccaagaatatttgcagtgtagaaaagcacttgccagtatgaatagagacaatctgggcaatgtaatgctcatcattgttcctttcccaatctcctggaagatctaactctcttttcggcatcagcaaccgctttcttctgtttactttccctgcattgcttaaatgaagagctaggtctcgcagaacatcatgctgtgtcacaaatatatcatagtggcttgcgtacaaagagccaagcctgcaaattaatgtaacagtcataatttcagaagactttttaaaccttacaaaaagtgaactaagtacaagttttatgatccctcaccgtggatccttcccaagagtaaggagattcttgtgtgacaaatcaacaaggatggcaaaagcatttccttcatctatatcatgtaactcaatccaaatgttgatgagaacatcaagaggaatcttcctgtcttcagggaaggcgccaagatccaagaaacaatctttggtcgtctggtcgagattgtctagactagcttccatttgacgaagcaatctactctcgtgagagtcatcagcaggttcaccttttgataacctctgcaatacgcccttccagtacatttcaggtttgccatttaatgaagcacccgtgactttgagagctaaaggaagccctttacattcattagcaacctgagccaaacagagaactctgagaatcgaaaagctttgaatattatgctaggcgtcggagaagaaactattaaaattacctgcttaaccagatctttgcagaaaccaagagggatagatttctgaccgaaagcacagagacagaagagagagattgcttcatcttcactcagtacttcgacatcataagtgaatttaggctcagtgagtttggatcgtgagaccacaagagttgtgcaaccaggaaacttaaacgaggtcaagcggtccagggcctgtgtggtccaaacatcatcaagaatcacgagcttacgcgcgccatcaaacggaaaattacagtcaggaacaggatttccagcttcacaaccagataagaaaccccatataagttccctcagctcctcaagaagcggagattgtgatacagtcagaaacaaaatccggttctcaaagtgacctgaagaaaaacaagtgtaaattcaccatgtcactcactaaacaagagactactgtttcgagtcactaacatagaatcagagtcgggacaagagaagagaagaagaagaagatgagagtaagacttacattggacttcatggtcccgttgaagttctttggcaagagtggttttaccaacaccgcccattccactgatcccaaaaacccctccttgagattcgaacatcatcttcttaaccttaacctttcccaattccaatccaaccccaaatttctccgaatcgtcgttggtctcaatctccatagcctcggctctcttcatggcctctgatatcaagccacctcccccaattttcatggaacccacttgctgaatcaccctgtcgaggctcatgtcaacccgatccaaacgcacactggtatcggcccggagatgatgaacgtcagcgaggatatgtgtaaagacctcatttttaaggaaattagagatggtcttctctagcttctccatttttctggctagggttagctgtcgatataaattccatcgcttagagctaaggactttgtcagtgagcttcttgcctttctctaaagtatcgaagagcataccgatttgagcttggcggtgagcaggaagctccacgccgctgtattgaatctccttgatcgtcggtcgaatgctatcgatcaaggtgaggagttgtttggcggtgtttttgtatctccacgccgttgtagatatcgtaaagagctgcttcaggagctccgtcgcaatttcaccggcgaaaaaatcggtgatggccattggataccaccaagtcaagtcaatggagctcgagagagagatagagagaagactaaataagcaacgaggagcaagtagtagtggaggaccccacttgaaaatttcctagcaattcgcagtgacactgacaacatcatcagcttcctaaagcaacaagcacgcgacaagactttttaaaactattttaaaatagaaactccaaagaagaagaagaagactatccaattggtcattctaatattaccataaagttaatggagactggaaagaaaagggttgcaaatatctctatcgagaatttttgaaagtatttttatgtgttcacatgaagttgatagaatttagggtgatttgcaagaatagctatatttgaaaaatgaattaaaatatagcacgataagtgtaataataaagaaactagcatgtgggacaatggaaaaaaccattttagtgttttgctgtatacaaaacaattggactatactatatagaagtgtatcatattatactagataaggcccgtctatttaggcaggtgtactcgaaattttcaaatactcgaacgggtctaaactttaaaacccgaaaaatctcgaacccgaacccgaataggtatccaaacatatctcaaatataagtatattttaatcggtaacatactctccagcgtttagaaattggttaatcggtaaagactacgaccaatcagttaacagccgaccgctctaccactttatacttatatatagaaaatattaggatgttttggatattttagttattttgtgtatttttagatatattcaaacaaaactactcgtgttgttttgggaatttttgaaattttcaagtaatttaatagatttgcacacaaaatttgatatttcaatatataaataaactcgaacccgaacccgacctaaaatcataaattacctcaacgggtcctaaacttctaaacccaaaaaaccgaacccgaaatacccgatccgaatacccaaacgcttagggctaataattaataaaaaaaaagaaatccacaaaaatatttagaaaccaaacattgttgaaaatatattttgtatatatgtcgtaatctcgtaagttaattttacatcatgcaaatttatattaaatgatttaaaattaataaatgaaaataattgaaaagttaaatcctataagctaagctatttttctcaaaatgttttatttttcacttatgattacatgagttaaagacaaatttgttaattttccttttgttgaataaatgttaattatttataaatatatagacatataaattagtatatgtaaatttgtttactttttaagattttctatttttttagagaataaaaaagttaaattttgaatgacacatgtaaacatctgatcgtttgacttgacacgtggcacgatcctatgaattagcaactttgaaaactatactttatataataagatataaattagtatatgtaaatttgtttactttttaagattttctatttttttagagaataaaaaagttaaattttgaatgacacatgtaaacatctgatcgtttgacttgacacgtggcacgatcctatgaattagcaactttgaaaactatactttatataataagatactttaattgttcataacaaattcatttagtatgtaaagaataaattggacaatagaaaacataactaggaacatacataatattatgttttgattgaattaaacaagagttttgatagaaaaaatataaaccctaagagaatttagggaacccaaggaaactaattatagacatgatccaatcaattaaactctaattcttttatcctcaaactaataatgattttgtgttctatatgataaacatgaaattagagagttggacagtttaactcaagtttaagtattaaatcaagaataagaagctaacatttattgttataagaaaatatcaaattcaataaaaacaaaagactttgcatttataaaatagtatagtattgctgccatgagtggagatttgaaacagacaataataagaaaagaaaaaaaatcaagttctcaaagttgatcataaattaattgagtgaattattgaaacatgagctgatgaatttggagattacgaagttatgaatgaacatggtaacaaatcaactactaatgcttggagaggaagagcaagccgccgtgttctcatgcagctctctattatggattttgatgttgaggatgatcagaatatggaattgaaacgacatacccatgatagatctagtgatctacaacccatacgacatctccgaaatggattacggcgagctccggcggtaggatttgaagattctgtggaagagggagtcgaaaaagagtggcggtggtggtggtggtgagagtgatgaggagatcgagggttcgagttgggttgctgtgatgcctctgtttcggactatggcggaggagaagtcaacgtgaaagaaaaaataatttgagaagaagacgagagaaacaaaagagatggaagaatatatgagggcaaaattgtcatatatacagaaaatacagaaaatatctccttttttggcaagtgatagtttcttaattaaagtttttttttgcgttagtttcccaaatttccctagaatttaagtggtgtacacattgccaagtcttttttgggtcagataattccacataaaacaatatattatcaagagacataatagctttttgattgaaaataaatatatggatgatatctagttgtgacgtgggttccaacctttcgcctatttcgcttaaatattcacagagaaaactatagtatatggagatgtatttttctctttcttttttttgtgtctctggcatttacaaaacaattcttatttcttaatactatttcactaataaaaggtttaatatctcctccaaagtagccaaagttgttcacgaagaaaaactacctaaggcgataaaaaaaaaaaaagggctaatgggcctcattgcctccatcaaattacggttagcccaacaattacaaaaactttttgacaagcatataaacgaacgttggaatcagggtttgtacctagagcatctagtggatccatgtccttgagagcaagaaactggcggaaaaaggtgtctgtgtcatcatcggccataaccgtagcactctctgagtttactgagaagttcttctgctgaaacccactgaacatcctttggcatatgtatgattcaaatgcatatttcttgtgaggcctcttggcgtaaacaacatcaggctcaatagaattggctgcagaatcaagatcccatcctgctgctttcatcatgttgattagcggcttggagaaatcatgcacagctttagcagcaacttcgtaagtagatacaaagagttcagtagtcaagtcaggaaactgtaaatttccatctccaccagaaccttcgtttgtagacattcctcttaacttaagattcttctcaagcttaagccgtttcttgtttgcttcctcaatcttctgcagcatctgcgtgatctcagaatccttgttctgaatctcagactgaaacttcttcaccatgacctcataataagtcttcaacaaactctgctgctcttgaatctctgcagctaaacgagagtcttgtggagagacacatacaggcttggggttattctctctgtaagaatgcttcatttcggaaagattcttgagttcagaattgacaactttgtccgctgcctgaatcttctcgggatcgtaaggagtatgagcactttgaagctcgatataagcagatttcaaagacgagatgtttccaaagagattggagataagtgcttccatagcttcatgattctgattgatagactcttccattggttgaggatggattatgtatgtgtttcatgtttggatcataaaaatataagagacagtgaaatcagcactatgcatgtcaccaacagaaagtaaataagagtatcaaatactataacaagtacctacaaatttgcaaaagaacgatccaacttgcaaaaaagattcttaaattcgaaaaactattgtcgcttgggggaaaacaatgataaccaagaactcacagtccctaaagtcagcaaagctttatttatataagacctttctttgcgccaaaccactggtttcagcctttgagctctcagaacctgccaggtcaatgaggttctgcaaatatatgtgaaagtgaaattatggtcagttgttcatctttaagtgttcagacagtgcaataataaacagtttgtcagagttaatgaaacagtaagctattaccgaacataaaatcacttgataaaaagaaaagatgttatagcagctccactttcattattgtcaaccaatgtattgaccatgggtgtcataagagaaaagttctactaggttgcaaagtgtgtaaagcagagaactaacctaaagaatgcaactataagctaactacagtaaaagtaaaggttttatagggtcaacagaacgacactagatacatgcataatgtgagtttgattgcctgtctgggacctcactcaagcataaaccaatgttaacaatccacagaacaaacatatcaaacaaagtgactgtgacattttctttggaatgcaaagccttaggtggtacctgtataatgtaattgtggcttgctatggctatccacagatgtctttggataaagttttgaaaacgaggttgttgaagatacaggggaatcacaaaggctttaacttgcttaatccagcagttgtatactttgatacttgtttagatcctatcacaaacgaaattccaacttccggtgactgaaaaaaaagatgcaagtacaaaactttatcaaataataagagctagtaacaagtatactattgcatttttttttgagtttttaagccaatcagaaggctctatttcgtacccactcgcagaaagagcgcgttgagcaagtgagggcgattctgtgggtaaacccctttccaattcatgactttttttatcgacgcacatctctccaaattctccatcgcgtgactcttttagttattttcaacaaaaccaataaaaccgaaccgaaatcagttttaatttcaaaaccaatacaaaccaaaccgaatcagcaaatagtgtgaagcaacaattctggacagaaaatttatcaacatctcaacaacgggaaaaagagaaaacaccacaactcaaaatcacaaatcatagaaaaatatccaaaaaaatcacagtagcctttgattaaactttcaaattgcaaaaatctcagaatcaaagccaagaagaatcctgaagatttctatttccatggcatccaatggaggaagaagaacaatctactgcttcaattaaacatgaaaaacgactcaaagagcttagctttactagttttagtaaaatttctcggcaacaaagtcaaaacagacatgaacacataaaaaagatactaaaacagaactgtatattcgacaagaacaaggacgatttgcaataattaaacagattagactcaccagttgaaatctaaaagcatgaatctagttgtgagctcttcgtgtttgcccccctttattatctttcttgacaagcatattcaactagttccttaaacaaacaaatttggttcaaattctatatgaacaaaaggcttcgtatatcctcgatcatgagatatatactatagtgtgttctccatctcttcagcgaggttaatgaccttgatccccttctcatcaaaggccagacatttctccaactgggcagagaccatacgaaagtttatgttggctgcatatctcttactgccattccccttgaggaggactcctaagtccgatgttatcttttatcactttccaacccatttctatttttagaattttagtttttgttgtttgtttttgaacaacaaagttatgtttagttagatcacttagggatgtttttactcatgaataatattgtaagatactcatagacatgatctacaaagaacaagaataaagaaaaggtggagtaatgggtatcagtctcgatatgatgtctaaatacaaggaaaaaacaaattaaccaatcaaataagaacgacgtcgtcttggatcagtgacattgatcttccaatgataatcagtggaacctctaagccttgctttcctcctctcccagttgatctccgttctcctctttttcgtcagcctgcaaaacttttgcaatgcatcgtccatggagtcgtgcactttccaccacctaacgtgagccgcatcactagcgtacaccaactgctcgtccacgtcgtagttgcaatcgtagtccctatagcaaagccatggtttccaacctaagtagtggaccgcgtagacctgaggcggctccgcggcgaagaggttgttcttgatgtttctttctttggttgtgttcgaccagaagttcttcagaaagtttactcgtcgaggcaatcggtgccaccacacaaatatctcgtttaggtacctgaaaatatatattttctttttttgttaatataattgttaagtataaagtctataatgtaatactaaaagtgctaattaatcacccttgatctccaccgttgtatgaaacgatctcgcttcgctggctcatgattgtagtaaacgtacaattagaaggctcgatgaccatgatgcctgaattatatatccatacatcatttccggtggccgacatctgaggaaaatggaagagaagatcaaggttacgtaagacgatgatgtcggcatcaatgaagatcactttgtcgtaatctgtcaattgccagagtcgaaacttgctgtagttgtattcattgtacgagtccttctccgcaagtgggtttctgattcgaatgatccgacgaagcttccatcctgcggcggcgagagctcgaagtttggtaatggagatggagtcatcgtggagaaggataagatcgcgtttggtgtttgtctgaaggaggctttgagccaaagttatggcaccacagacataagactcggaagagtgaagaacagttacgtaggcttcacgttttggtcgttttgtctctgcttctatcttcgttaggtcatacactttgtctacacctgctttttgtttttggataaaaaaactcattaattcatttagtaaggccattgaaaaaacttcttcaacgattattatcaaattttagttattgctatatatgcatggataggttatcaaaaactacttcatccattgcattttcttaaaccagcaaaaattgcatttttgtgattagaatttgaattatcgtatttataatattcatatttagtaatcttaattaattgacaaacaaatacatagagagttgaatgtttttctaatatattagcatataagctatcattattaacctgccgtaaaaaaaaaagctatcattattaaccttattcgatgatcattcgttttcttaaaccacaagctatttagctaactaactcgatctaccaatacgaatgctattttggaaagaaattaagggtttaatatctccttaaaaagtgtaaggtagcttgtatgacaattcatatttggtggttagcaaaacgacatacctaaaacacaaccactaacatatctaactaattaacacacatcaatcaattataagcaaagtatagaaacatatcgagttgttttatattacaccatacagttggtatctttcacatcaatttcacttaagcaggtccttttatgttacaatgtcttagtcacttcatagttcatctgacacatttccgactatacacctttttacgtttgcgccacaaaacacggtttcgatttcaagttcagttcaacatatattttctgtttgtttagtttaattacttggaaaaagtaaccaaattcaaaaacaaaagagtggtcaaaataatttgctaatggtactctaagtatattaaaaacaaaaaaaaaagatttttggtttcatcataattaatttagttacttttgctaaaactaaaaatatttagcaagaagattaatttgcatgaaagtaattttaccttgtggtgcccacaaaggaagagcaagattgcaagatccgactggcaaactgagtctctgttgtaacctaaccacctcagggcgatacagccaccaatctgcctctctcttctccaaatcatcacaccggaaaatctcaatcatcggttgacatttgctccaaaacaacactttgcttttccatctccaatccgtcttccctttcttggctgccaagttagccgcaactaggttcacttgcaacctcaaaacctctcttctccacccttcttcagggtaattacaaggcaacttcactactaccaaatccaacttctctaagctttcgaaatcgggcataggtatctcaggacatgtgggaacctcggtttcttcctcttcatctatccactcggggaacaagtcttgccatttgaagagcttcgagacacgctcaaaatgtatgtgaaccgtttcgccataacgtttccaattagtaagatcacattcttccatgttcaccatccctatctttgtttttcctaaccctcttgttaaaatctcttccatgaagcttggcgcctccagctttgtctggttactagcggttagcaaatctttcttgtttatttcgttctcttcaacgagttcttgcatcttcactcctctcaccacctgatcacatagcagtataaagatatctattagtctaagttttgatataagatttactctgcaaacaaaaatgtaaactcaccttaccttgggagtgcaatcacgaaaagagcatccaacaaaggaagctccgctgctgaaatagactgatgaagaagggtggaagaaaatggcagtgtagagaagaaaagagaaacccaacaagactagattaaagcgtatcagtgcagatttggaaggagccatcttcattatcatcgtcattatcgtcatctcgtttctgaatgacaaacatttatctttcatcttatatatatacactcctaaatcaaaatgtttaaaggtttcacgagaaatatgtgtaggaatattctttgtatgcgaaccacgtgaagggtagagaaaaaaacaaaaacatggtaattagtactttaagtagaggttgagtttttttgagtaggacaaaaaaaacgtctaaaagagtttacattggacgtgtcaaaggattttctttactcaaacacaagcctgatgtattattattaaacaaagatatgtcgccaacgattgtggttggataatgacatgagtttgcgatacgtatgccttaagatacgtatttgctctcacctccaaacatgggaccaaaattacaatattgtaagggatcctttttatttactacatatatcactttatctcatccaatgcaaaacccaaaagggatttcattaaaagttatctaccgtcatttgaaggttctactattaatggtgctccaggacattgacttttgttaccactttatctattcacaaatcttggtaaataatgagacaaattgtgaatgcttgctgttacataagttcggagaacatgtaatctccgataaagactatacaacaacttaacacaatacaaaaataaaataaagtagtagttacagctcaattgaataaaggaaaatgtcatcaaaagtaggataataaactacatatttccgcccaaaaaaaaaaaactaaaaaaaaactacatatttccacaatttgatgatctttatcagaaaacgatgcaatctatgttagaaaataaattatgttacagatttgttcacaaaacctctaccaactacaacttttgaaaaattggtacaaaagaccataggctacaattggttggaagaataaagaagagaaaaaatgttagtaggtgcaatatgcgacgacggaggaagtcaagcaagcaacaagtttagttctgctgtcaacatcgcttacttacgcttcaggaaaggatcaatgcttttgaaacaatctcatctccttttctttttcttacttcaacttgttttttttaaggcagtaacaattagtaaggatgaaaataatcacattatcattaagctgagatgtcaaagcgattatgatgagaggaaaagaaaatgaaaataagtattggtaagacatcttagttttaataatcgtatatcaaccaaatttgatcaataattagcttaaaccaacatatcattttagaggcctcaacctcctttgaataattaggctgatactacattctaatgacagatgaataacgtacatctccactttttaaaacaaacaagattatgttatttgatttaggtatccgtatatgccaaatatatttttctggatgtaagaaccacgagtaacatgttgatgatgtgtttaagtggtaaaaggagaggagaaaactaaattttgggactgtgttgagctctttgggcaattgataatattgcaaaatctcaaaagaggctgttttttttttatcaagtaaaaatacacacattgtgtctattatggttttactctttgatcaaatcctgcatgtgttgtgcataacttcttcccggtggaatgaatattacatcttcccaacctgaattcttctcgctcatctacattgattcaattcagatttttattagactaccaggttttcatactttaaggtttctttaaacaaagaagaagcgtgagtacctccattttcctcaacacatcttccagactcccaacctgcaaaacaaaaagattagttccatggtgaagataagaaaactcttaacaaaaccaatgctgtgaaattactttatatattgatctctgatatgcaactttgataacgataaaccttggaattcattttaactcagatatatgaaggcatgtacaatctgaattccgctctttctaaagttttctaagacttttccctttccctcgctgttcctttgaaaacatggtgttatatgtttgcagaacatgtaatcacaaaaaatgctagaaattacatatgatgccaacacagctactagctactcccacttgttagtaaaccatgtctttagatcaaggtgtttgtttctatcttacgtggcctatcgaagattcaaatacatagaaggtaggtatgaatcattaccataatttgttgatctcctcttgatgctctcgtatatttagaaagttccctctctatatcttcctgaaagtggtcacgcagaacaggaaagtaagagttatcttcctctgttttggcttatgagagatctattagtattctttaacgtgggagaagaaactaaccaaccttactgaaatatacagggcagtaacgtctattttttttcctcacaacaagaagctcagactgtagaggccaataacaacagatagatatcaagagaaaacaaagcaaaaacaccaaaacataaggaatccatattggtataatagaaaaacacagaaaatgagtatatcaatttacctgaaaaaccggaactccatcaaacccattcttatttcctgaggatttgagctgagacgcaagaaaatatagcttatggataagattgaaatgccaaataaatgctatagacacatataattaaaagtctgtttagcatgagccaacctctaacgcattctttatttggattggatctggcaagaagcgaaaggaaatcccttcaacttttagcaagtacacctgtaaacaacatcatcttaacttctgggaatgtagctaccacgattacgcaaataacatcaaaaagttccctaaacgtagttataacttataagttccaagccattagagggattataatcatgccatcgttgcattctttcttgtgacgatgttgtcaacattgctacgtgcacaagaacacaatctcccgttcattcaaactgccaacaggtgttcctattaccgtataatataaacaactaaaatgaggccagacatgaacaagtctacttagaatttgagctcctgaaatttgtttgtttcatttgatttaaccaatggcttcttccacattgatctaatgcagtgatcataaggaaagggaactacctggtccagagtaatgggaacaaccttcgcattggttttcaattctcttctccgaagtcgcgcctaaaggagtatattagagaattatgagctcagaaacttcacatttttttaaaaaagttcggaggagaaaaatacaacaaaaagcgaaacctgagcaagaaaagcttcagcatcctcttgtcgaaaacagagcaaaccgatagacttgcctccggtaggatccgagataagaacgaattcgttattggtgttactgactgtaaacaccgacgtcccagcgagagctttagcgacaagagatggactcaacgtcgtcgtcggggttccagacttggattgtgagacggaggcgaaaggcggcggagtaggaagagagaaacgtcgagtagctagggtttcggcgaatcgtttcgtgtcttcgattcgggcggagaggtcggagctgaagcgggtacactggtggtgaatgaaagaagagaaggagaggaaaggattgggtttcactgatgactccatttttggatttgcagagagaagaaagaagtagaagaagaagaagcaatttttgatactatgaagagagtgaagaaaaaggcttcagagcaattcgtttgggcttttttatttgggctttattggacttgattggttttagtttacgtttaatatggcccttgatcaaaagtttggtgacaaagcatttattaactttctaaactcaacttccacaccattctaaacacatgacatgacttacaaaaagcttttgtcactcaaaattcatgtcgatgacatttttttcctccaaatttctcctccttataaaatacttactagatcaagcaaacaacacactaaagaaaacaaaattgttaaaactctcgttaactgaaaaatatgaggaacattactactacaacccgaaaaatgttactacttgtgattacgattttattggggattgcgtatcatggagaagccatagcatgtccgcaggtaaacatgtacttagcacaatgtttgccttatctaaaagctggaggaaatccgtctccaatgtgctgcaacggacttaatagtctaaaagccgcagcgcctgagaaagccgatagacaagtagcttgtaattgcttgaagagtgtagctaatacaatccctggaattaatgatgattttgccaaacaactccctgctaaatgtggtgttaatataggagtccctttctctaagactgtggactgtaacaggtagctactgcagtttctttttaatattgccgaaacatgtgtagttgtgagagcttctaactacataatcctctaattgacctatttaatttgttttgtgaacactgaacagcataaactgaaaagaagattgactaccaacggccatgcagctacaataaagtggatatcctaaaagatcaaaacatcatgaacaaattatatggatacttagtatttatcttctgatcatatatgttatagatgtaatcatatagttcttggcagataaaatgtgattatttcccacatttacatattccctctttcctactctcacacgtagctcaacatcttaaaatatgatcatcagcatttgcacacaatgtttcacatttatttgacatacacgatcaaaacgaagcagttttgtaacaagataaaaatcgattgggttaaaagtgtaacgggagaagtaaaaatgtagtcatcactcatcatagtgactgaattcaagggaatattattcttcgaaatacctgaaagatgggaaatttgaatttcagtagtgaatgacgcccagactcttcaaccaagggagcatctcctccaatccttcctttaggcttcgagggttataaccaagttccagcttagccttatcacaagagtatgaccactgatgtctcagcactgtcactgtctgttcatcacaaaatactaagagttgagattattctatacctaataagataatctataatatgtgggcaactaatgaatgcaattgaaactcaccggaggactgataagtggaagctttcctgtaacccgagagattaaaacagataaccatccgtatgcgttgatggcccataatggaatgctaaagtttggctttttggttccagtaatcagtgcagccatgtcaaagacaagcttgaaagaagcattttccccagtgagtaagtatctttcaccaagcctacctttttccattgcagcaacatgaccctccacaacatcatcaacatggctgaaggagtatctatccgtcccagagccaatatatccaggcaacctcccgttaaagcgctcgatcaactagaagaacaacatcatgtgataatcaaccacatactgtcaatgtaccactacatcatcccaccaatgcaactctaatcagcaaaaggaagaatcataccattctagcaaccatattggctgaagtgagcttgcctggaccaaaaataacaccaggatacagcaaaattatcggcacaccttcagaagcagcattcaaagccatcttatcagcaacagccttggatctctcatactcagtgcagaagaacctctcattatgaaccttatctcaagaccagatcaaaatcagaatcaaacattacaaaacaaaattttgaaatttaaaagtatcatacttgattctcattagcaacagatccatcggtagatccaagagcgaagaaggaagaagtgtagataatcttctgcacggtcttcgtctcctttacagcttccaagacattcttcagtccaccaacgttgacctgagcttcaaatatcaccataacacatgatctctccaattttgaccttaaaactaaagatgtggaaccaaaagaaagcttactgagatgaatcgagatgggtcaggaagccaaggctcaactaaagctgcggcgtggaaaacgatatcgcaaccggagcaagcatccgttagagaacggtaatccgttacgtctccataggcgagctcaacttctggaggtaagtcagagagatcgctggtgcggcggaccaatgcacgtacggagtggccacgacggaggagaacgtggcagagtcgtgcgcctaagtaaccagtagagccggtgactaatattttcatattttctgtttctgtgttgggcatctttgggcccatcgttgcttttctaagccaagaaacctctaattggttgagagggtttaattaattaatatttaatacaaacatcattgtctgaaagctggatcaaccaatagcaagattcttttgtgttttgttttgtcacatactacagataacaaagaactagtaagtttctcatttgagtgaaacaaaatttcaaattacagacagatccacgaaaatacaagatgacataatgagtaaagaaatctcaattcggtgatagctagttcgaaacaagattagagcacgaaccttgaaacaagattacacctctcctctgtatccatcagagccaaaatggtctttcctagaactagatatagctacactcttctgatgttcaaattttggacactgtagaatccgatgcccgagaccaccacaataagcacaacccttgacaccgcttgcattagcaatggtttctgtttcttccattggaccattaagctcagcaaggacaggtggaatcctctgtttagcttcttgcaacaagtgtttcaaatcgagcagcgtgatttcgctttggttcttgtttataaacgtagttgctatcccagttttcccacagcgacctgttcttcctatcctatgcacgtagttctcaatctccccaggcatgtcgtagttgattacatgttgtatatcagggaaatctaaaccctttgaagcaacatcggtcgcgaccaaaacgtcttttttcccagctttgaacaaagatattgcgtaatctctgtcttcttgatcttttcctccatggatagccactgcttccactcctttcagtaacaagtactcgtgaatatcatcaacatcagctttgttctcacagaatattaaaaccggtggagtggttttctgcagacactccagaaggtaaacaatctttgcttcttgcttgacgtattcaacctcctgtatgacatcgagattcgcagctccagctcttcctacattaacagttacaggtttcaccagagcacttgtggcaaagatttggatttttgcaggcattgtggcagaaaacaaaagtgtttgacgctgagacttaaagtggtcaaagacatgtcttatgtcatcttcgaaacccaaatcaaccaacctatctgcttcatccagtgtcaacaacctgcaagcatctaagctcatctttttcttggcgaggatatccttcaaccttccaggagtagcaacaacgatgtgaacacctttcttaacaacgtccaactgtgatctcatatccactcctccaatgcatagcaacgacctcaaccgcgggtatccatcctcgactaaagatgccacaaactgttcaaccacatcgtaagtctgcttagcaagctctctagacggacaaataacaagcgcaatgggaccttctccagcagctataggcatcattatctcctcctgcagagctaatatgatcataggaagcacgaaaaccaacgtctttccggaaccagtgaacgcaatcccaatcatatctctgccagacaaaacaacaggaagaccctgaacttggataggagtagggtgcattattcctttatccttgagcatacggagaagtggactcggaaatttcatatccatgaagtttttgattggaggaggaatatcttcaccgttaactgtaatatgccattgcttcctaatcaaatccatctgtttggttgacatcttcctaacgtgcagagggggtttccaccatgttgagagaggctctgtataagtgatacctctggctaattcaccaacagacataagcttcttcttgtcagataaatgctccatcatccccttctcttgtaaaataatggcctcggtagcactgacttaaggtacatgtcgcttgagctgagttgcttgaacaagtaagctaggtttagcttcttcagtgagctttaccttgccaggttcttccaccacctttcgcttcatctgcgctagacgctcctctactggaacatactccacgtaaccatcatctacttccatgattcaaaatccactcgccaactttttcaaagatcgaatccaaaccctaatcagcagatctctcgactttcaaggaagatcacgcagatagatatgaccgacacggagttttggttaaaccggggttggggaatgatcgggtgtgttgtgttttctgattataagcaaagaaaagaaaagctacaagaagagagtctcaattagaattcgtatgttgacaaggagctaggtaaaaggtagtttttcaaaaatttaatttccatttttttcatatattggattgaaaaatggcaatgacatgaatcataggattatcaccacatttaaagatgtagtatttacataacaattgcaagaaataatactacaaaacttcctatctagtatagacgctgccaaagaaatacatacgacgtttttatccacacgcattgatgagattggtatatatctctgtctctgtcgagtgaaaaataaattaatagagtaataattaaaagctctctctctctatctcccacgatttcctttttccgccggaagaagaagcaaaaaaaaaagaaatcgaatctctctttcaagtgttcgatttaaagcaaaagtgtaattataatcggaagcgagatcttgagaaatggtgggatgacggcggagggagatggcgaggggaggaggagaatggaccggagggatcgccggaaccggagttctctctttcaaaagaatcactctacttgtttgctttttcaacattctcattgctctctttgttcttcgctttctctatgcttcttctctccacatctattccaataacgataatggttcctactttttattttccttttcatttttgctctctgattcatgataattcgtatctgaagcagctctgttggttttttgttattcagttgttaagtacacagctgatgagattaggaaaatggaggaatctattcggattcgaagatcgaaggaacctactctgattcttcaattggttagtggctttttaaaatggaactcgaagatgcacattggctcttctcacaatgtttgatttccttgttaggtgaagaagctcaagcatgaggtttccactgcagaatctagtactgaactatctcctaatgttaaacacaaactagttgatgagatcctccagcgtttgaaaagctttgaggacaaatctaatgttactcagcttagaggtttgtgctactctactatgcccattagcttcatgacatttatttttcaaactgccacaaacttgcatttcatgacttttcctgatctagctgcttaggatttgtcttattacctctttggaatgtcatggtgatttgtcttattacctaacctgtgtaagattttgttggtatcaatagctcagtttagtaaatatttcattatcattcatgtagaagtggatttttgctcaataatgcatatggttatcaggatagtaaaataggctcacaaatttcagacctttctgcatgcactatcacatactagacagaacaattgattttagcgggattttcaatggagattttttcatgcctagtttttctattcttcttgtataagttcatcaggtctatggaacataagctctaacacccacttaagttctgttataatctatgcattgatgatcatatgctatgtacatgaaacatttgagccacagaaactctagcggtggtgccattgtatacataatcttttcgatgttctttagattctcagtagcttacctaacatgttcgtatgtctcaacatgcttctctaattcctttctactgcatcagaaaaagtatgctcaagaattccaaaaagtcatgatatttacctttttgacttgttaaaagtagatttttcattctattcacttcacttgaacaactcttaacatttattatgtgctgactaggctaatgcgcaatgtgcgttaattcttagttatttacaagagttattggaaaaaggtggaaggtaggaatgggttaatttatttggttagagagaggtgacaaaattctaataatccagactttgaagacactggatttctttttgatgcttcaaactgagttctattgttttcccttgtagtattcgtaatgcacgtagacttgttaatgttttcgcctacaatagttttccttttgacacattcatgttatctctgtagtgacctttaataccttcttatcttcatttggcaaacagaagttgtagaaacgtggcgcaatgagaagctggaggaagctaaagagctaattcaagggcaaaatggagtaaattccacccttatagtggaggaagcaggtattactcctttagaaagattactgagtttctcaccttgagcaaagattcatttatggagtcctcccgatactctatccttgttttgtataattagagagaaaactaatttttgttctgtaattatctagggatgcttgtaagagctttggagttggagtgggatgtgctgtctgaagaaatcggtttctggttacctgctgaggttaccaatgtagaacatgatgataaacctgaaggagaggaagagcctggtaatgttttcaaaattttctacattcttgatctctgcttttgcatttatttgggtggaaaagtgtggtgacactggcgaattcaaatctcatgaagttgtgcattttttccgtagaggaaatattggcaggcagaccagtgccagctgtatgtaatgcagagcttcacacagattatggtggtgctgcagtgagatgggggcttacacatcataaagagagtgcagctgattgttgccaggcttgcttagaccaggcaaagcgtgcgaaacctggagaaacgagatgcaatatttgggtttattgcccatctgagtttggttgtttctctccagatatttatgagcataaacatcaggagtgttggcttaaatacgtaagaacttacctcgtacacatactactttacccaattttcagtttccttgagattactcgtccaagttggactggaagcttggctcatatccaatatgtctatgtgaattgcaggcagagaagccaaaacagaatttcaaagacagatattctgagacatacagaaacaaccacccaaaagcgccatctatcgttccatgggtttcaggtgttgtaacggcttgagcaaaacccatgtggacagattgatgggagaaataggagatagttttggtttttttttctcagctgtgttaccattttcagagtcttgaaaattggagtaccgtaccaaagatgcaaacatcttttggccagatgtatacgagggaatagaatgttttgttgtttttgttgattggctttaaacacttgtggtcgaagtcgaatatggtgtaaggaatcatgtttttgttcaagcttgttcgattctatagtggatgattaaaaagctatctataaacatgacgaatgtctgtctcctgttatatgatcagatcaaatgtttatgtctggtctgtaattatgtcacaaaacatcacagtaaaactctgaaatgaaataatggttgaaatataggaactaaaaaaaacaaagcagaaattacggagggaaaagagaaaacagaggagtgtgttcatcttttgcttccggggttgtctctattctaaatatagactttccaattgtgtacctctcttttcttgtcttcttaatcagaaaatcaataattctcttctactttcttcatttttccctttctcttgtaagtctctcttttcattgattctttctattggtggcgagcttcgttcaatcgttttagcatttctcttgtaagtttcggccttgctttcctccgatggaggatttgaaaacaacagacgcactatctcttccagttgttagtgataatggtggaataatagagcctgagttgcagctacctcaagcaataccaacagaacttgagaataatgaagaagaaaatgggacaattcaacaatctcaaagtgaagaagattccgcagaaaatgggaaaatttatatggatgacacttttttaccttcaaaatctcaagtaaaagaaacacaagattctcctactactcctagttttgtgtctccctctgctgagattgttctgcctcgcgtaaacaccaagtatgaagcagagggcacaacaagaaatgcagtgtctccaagacctctgtattcccctagaagcattggatctccaagagcactactgtctccaaggtttgcaggatcatcatcaccattgagcaatggaacacccataagtatggattctttcagagactcaattgatacagcatcaccttttgaatctgtcaaagaagctgtttccaaatttgggggaataactgattggaaggcacatagaatgaaagtattagaggtacattttacttatgttatgtctacacatctgtcttttttgcctctgtattggccaatagttgtgctcactgttttcgttgcagcgacgcaattttgtggaacaagagctcgacaagatccaggaggagattcctgagtacaaaaagaaatcagagatggtcgagatgtcaaaaatgctagcggttgaggagctagagagtacaaagaggctcatagaagaattgaagcttaatcttgaaaaagctgaaacagaagaacaacaggcaaagcaagactctgagcttgccaagctgagagttcaagagatggaacaaggaattgctgatgaagctagtgttgcatctaaagcacagcttgaagtcgctcaagcaagacatacatctgcaatttcagaattggaatctgtcaaggaagagctacaaactctgcaaaacgagtatgacgccttggtaaaagagaaagatttggctgtgaaggaagctgaagaagcggttattgcttcaaaagaagttgagaggaaagttgaagaactcactatagagttgatagctacaaaggagtcattggaatgtgcacattcttctcatttggaggcggaagaacataggattggagctgccatgttgcgtgatcaggagactcaccggtgggagaaggaactaaagcaagcagaggaagaactacaaagacttaagcaacatttagtttctacaaaggaattacaagtgaaacttgaatttgcatcagccttgctgcttgatttgaagaaagaattggcagatcataaagaatcatccaaggtaaaggaggaaacgagtgagacagtagtaacaaacattgagatttcattacaggaaaaaactacagatatacaaaaagctgttgcttctgcaaagaaagaactcgaagaagtgaacgcgaatgtggagaaagcaacttctgaagtgaattgcttaaaggttgcatcctcttccttgagattggaaattgataaggagaaatcagcacttgactcattaaaacaaagagaagggatggcatcggtaacggttgcttctctagaagctgagatcgacataacgaggtgcgaaatagctttggttaagtccaaggaaaaagaaactagagaggaaatggtggagctaccaaagcaactgcaacaagcaagtcaagaggcagatgaagcgaaatcattcgctgaacttgctcgtgaagagctgcggaagtctcaagaagaagcagagcaagcaaaggctggagcaagtacaatggagagcagattatttgcagctcagaaagaaattgaggctattaaagcttcagagaggctggcattagctgccatcaaggccttgcaagagagtgaatctagttcaaaggaaaacgctgttgattctccgaggactgtaacactgacaatagaagagtactatgagcttagcaagcgtgctcacgaggctgaagaagccgccaatgcaagagttgcagcagcggtttctgaggttggagaagccaaagaaacagaaaagagaagcttggagaagttggaagaagtaaacaaagagatggttgagagaaaggcaacacttgcaggagcaatggagaaggctgagaaggctaaagaagggaagttgggtgtagaacaagagctgagaaaatggagggaagtaagtgaaaaaaagagaaagaatggtagtagccatggaaaaagcattcaagggtcgaaggagaaagaagctgagactagtgtatctaacgaaacagaaacaaacccaatcccacaggtaaatcctgtaaagaaaaagaagaaacttttcccaagattttttatgttcttgatgaagaaaaagtcacataagtgagttcgatgtgaagaagtcgattgtgtaaaattctataaatatttaatctatactattaacttagagctaaagcttccttagtttcaaagatgtctggaacaatacatgaacccaacaagatcaatgtttgtttctgtcatgagttagtcaatgaatcagagaatacacatttgttgaacactaactttggcgtaaattagcgtccttgaataaaagctaagaagaaattgaataagctttcttcatgatacatcttcaaacatatcttcattcaaatgaaaacgaaaaaataaaacgtctacaatacgaccaaacatcttaaaagtcaaagccagaccaaagtaatttagcaacattgctaggtgtcttatctctgaatctaacatcgttctaagagccagaacattgtaatttcacatggttacaaatagactagaattcaaatgaaaataactagtggtccggtccatcacttgcttgtttcatcgcttgctggataagctgaaagagctgactttcataggcgttgcaatgaccaaaggcgcttcaggtgaaccagagattgcaaagttgtcattcatgaagcgactgtccactatagattcatttcgaaggactatcttgtagcagtagcatttcttcagcccttcctgatcatggtagcattcatgagatccattcttcacctgctgaaagttccatatcacactgaacttgccaacagtagctaccacatgacgctcctgtttcccatcctccgtgacctatatatcgacattttcaacaagaaaagatagacaaaaagagtcaggaatcaactattagtaaaaagttatttcaattgatgaatgattcaacagtagtaaaagttcctctatcaaaaatcaaggttgaaacacaaggcaactgaggaacactataattcaatttccacaaaaattcttaagacttcaatattatatgcacttatgctatgagcaaaacatgaaaatttcaagaatgtcactttctcagcaagaatatacactgcaactagagttctgcttacccaagaaaactgagcattgcggaacttgttgtcagatccagctaaatgtgcatcaagaggcctcaacttaagcaaccttggtgcggcaatcttatttcccatgcgaccctcgaagccggtctttgttttgccacttttgtcagtgaaaagggtacagataacaatcaaatatgtgtcagttgtaccaacaatccatttcccatcgaatgtagcatccacatgagtaacaggtgcaccaagtccagggaaagccgtctttgcctgcctcatagtgttgctcgagtagagtctaattttgccatcaagagagccaacaacaattgagccatcaccagtagttgcaaagcactgaaagttagtccctctagaaaactgatgcccctgtgcccaattcaagactggagtattcgcagtagcaagatcctgaaccatcccatatcggtcacgcatatcccacctgcaaagcctattgttatccagaccaagaaacgttgacgcagatggatccaattgagcacctttaccatcattagtaatgtcactcatagagatatccactccatctttctcaaacttccactctgaaataattttcccggtttcaatgtcaagctgatggatacctcgtgaatgaggcgtttggctcataggactcatgagcagcatattagtctcagctctcatgagaagagccttcttcggtgctgaagaatgagttcgaccataaccaggctcaaagttaacacaaacacctttcccttgaatcccctgtctcatgttcttgaaaacctgaataccagaatctccaactagaaagctattatctaaagcacctagagctaagctatgtatgccctcacttgtagcttcttcaaaggcctcagtcaaatcctgtgtatctctagccggagttgcagatcctcctcctgggctttgaagcaaaatatcatcagcatcttcccacatggaatcatcagcagcttcaggattagcccacccaatgaaatctttcccatagatttttgccttgttagcctcattaaactcaacaccatgattgttctcaaacaagcaattgttatagctgcttacaaaaaccgaaaaatcttcactgctggcgaatttcatagcccaaacagctttagcaacgaaatcaacacggcgttgatctttataagctttcaattgcatttcatctgataccttttcacggatcttgcttccgactttcaaaatccaccattcgttttccacatctccgttctcatcgtcgtcttcatcatcttcatctcctttgttagtcttgacgaaacaataagcagtcagtttctcagctgtgacccatttggctttgggagtgttgccattgatgtagcggaaaagccgagctgagttctgagtagacggggctgattgcgtcaatgggtatttcagcttcagggcttggagttttgcctcaacgtcgtcgagtgatgatgaaggagatttaggccggagacgacgaccaccggaggaagatatacctaacgtatcatcccgcgagtcctgaaacgtctcttcctcttcctctccctctcttccttcttcatattcttcatattcatcttcatcggaggaacagatctctagatcttcatgactgtgagatgctcccatatcgaagaatcctggaaatgggaagagctagagagaataacggcaatgagattattcaaacgaaggtgggaagttgaagaagaagagagaagagcgtaaagttcgaattttgaaaattagggtttttcaaaagcatgtgttcctgttcccctttggacagattgaagttaaccggctatagcccgtaaatgcggatctgtaagtactttcatataccggctatagcccgtaaattcggatctgtaagtactttcatgtaccggctacagccagttgaaatttttatgatttgtggttcattcaaattcaaattagaagtggtccgatttttaagaagtacggttatgttgtgatttggtgatgctgtaacttcgtcttaaatatgttgtcgttttgactcgcattacaatatgttatcgtttaatttacgatacactgtaattaattaatagtttcaatattatagaaacgtttggtcctttagtcggagagactgatatgcgacagaggatccaacgtcgcgactgaaacctagatcccaattctccgtttccaccactgtctctcctccgtcgttagggtttctcaggtgacacactccgcttctcttcttttccgtcttgatctaatttttccgtcaattggtttctgcaatctctacgtttcttctctttcaccttagatattgcttgattcccacattaattgttgctgagaagtataattaatttcttgatcgaatttaccagttctcaaagttttgtgtccgttgagtacaacaaattcctcgaaattgagtcattgattgaaataccaacttaatttttgatttctgggtttgttattaaaatgtagacacacacttggataactgagtttccttaacttcaatctggttataaacaattttaaatttaccctttttcttaaagaactcaactttagcttgaggtctgaatttttgtgccaaacatgtacttagtagcttagtaaccatgtcttgtgaactattatctttcttgatgtcccttgttctgtaaagttcgtaaaaacttaatctttttggttttaaggtggcttacatgaggtttgttggtgtgattttttattttacaggttcacatctgttggaaacttattgcaactcctaaaggcatttcacatatttgcttttatgcgtacgaggcttgggggatatttatataatccgaaataactcttttcttatcatggagactctgtggactcttttgtatttgctagaacctgctccagctactctcattgtcacagctgtcaccgtgacatttgcatccgctttccgtgcacttaactacgggaaagagatggagagaaaccgtgacttctctgaagcatccataacactagatagctctcaggccttgatgatcccagttatgagctcttgcagtttgcttctcatgttctatttgttctcttctgtttctcagctcctgaccgcgtttacagccatcgcctctgtttcttctctcttctattggttatcaccatatgcggtatatatgaagacgcagcttggtctatctgatccctttctttcacgctgctgctccaaatcgtttacaagaatccaaggattgctacttgtggcttgtgctatgacagttgtggcatggctcatctctggccattgggtgttgaacaatttgctcggaatctccatttgtattgcgtttgttagccatgttcgtcttcctaatatcaaaatctgtgcaatgctcctcgtgtgtctctttgtatatgacatattctgggttttcttctctgagagattctttggtgctaacgttatggtggccgtggcaacccagcaagcatcaaacccagttcacacagtggctaacagtttgaatcttcctggactgcaattgatcacaaagaaactggaactacctgttaaaattgtgtttcctcggaacctattgggcggtgtggtgcccggtgtgagtgcctcagatttcatgatgcttggtcttggtgacatggtacagactaatcccttctttgattttaagattggtatgtcgttatatgtgtactaactgtaagaaatgttctctctcagactatagtgacgaggagataaaaaaaacatgttgtattgattaactgttttgttgttccaggctatccctgcaatgcttttggctttggtcctctgctttgaccatcgaaaaactagagatgtggtgaatatttttgatctaaaatcttccaagggacacaaatacatttggtatgcacttcccggatatgccattggcttggtggcggctctagctgcaggtgtcttgacccactcacctcagccagctctactttatctggtaatattctcctcatgtgacttctttgttcctcttggtctaacatcaaaagtatatattctactacgtgtatttgtgcacaaccgatatcaacacttgattcaactgaaattttgttgatagaatctttgtagtctcaatccaatgattttaagagcttgatcagtgtgaagtatagtgagattatgatgtataatctgttttcgatgtggatatataggtaccatctacgttaggaccggtgatcttcatgtcatggcggagaaaggatcttgcggagctgtgggaaggacctgcattatctaatcccattgagaaatctcatgaaatagagatctgagtttattatatcaatcaagatgattcagaaatctaaaacatattacataaaacaaagacgcttagtaggaaaacatcagatcaagaattcttgtattcttaagttcccaaaaaaagaaaaaaaaaaaaaaaattggtcagaaagagagatgatgtcttatatccctcattttttttgcgttactcaaagggaggaaaaataaacaattaacaagttctttaattttttcttatgaatagagataccaatactaaaaaacgttggcttttgtaatgaagaagttttagtgataatataagttaaaattaaaagtgtgtaaccaattagtcttttttttttccgtcaaaaaaaagaaaaaaaaaaaaaagactaattggttacacacttttaattttaacatatattatcactaaaaccaattagtcaattacacaaatttagtaataatacatagggtctctaatatatattaagctttatataaactaatgaggaaatctgtaaaaatatacaaataagaatttccaaagtagatcctatgtaatttcgaagcgtattactgtgcataagacagtgttaaccaaaaaaaaaaaaaaacatttccgagatgaactgtgttttgtcctcaccggataagaaagtggaagaatgaaccactacaaagtccgcgtcgaaagcactcagttataaaagtaaaattgacatgcgattacattaaaaataccaaactcgcttgtccatttttattgatattgcttgctaatggaagccagctacatgtccgctttcttgtttgactttctttcttttctctttgagttctcttcaatattaatagatgcattttatgttttgcttcttctgagtagcatcgtgaatcaagtcgccattatcttattcagcactaatataattatatatagccagaatttctaaatttcaagaatgtagacaagttctagaaacgccgtccacagttccataaattctagctagttttctgtaatatttcacataacgattcatagacttttctgttcagacaaatatatactttgcaaaacagaacatcaagctcagtagctcacaaccaaaattctctgtccaaatttgaagtaacggaacctagtgtcttgctgggtttgagacttctcaatcaccatatagtcagaaatacctatgaataagattatcttgatgattttttaaaaaaagattttcttcgttaagcttttcttttgtaattagttataaaccttctcactttcaatgaaattcacattcatataagtttaaattttaaattaaaatattggtcagctatagactatagtaagtatattaaataataataacattttttgtggacaaagagaattcgggttttggggttttggcaaaggaaagaaatggtcatatgtggaacactacgtgccacttttcatgcaataacatgcaaatattaggtcagccactaggaatagaataagttgaatagttttttacgatgataagagtaagcgggaagccataatagaccactatcccaaaactttaatctgcttccaactcattatgggaccaactaatacaaaatgatatgtattccatgttccaaccactccaatacgaattacgaagcaagcgtgtctcagtgtctgagtgcgactgccttctctctatatataagagatatacatagtgaattaaacatcttaattatactgatctttatcatgttgactagatttaagaaacaaaataataagatggttagggcaaatatagtgagcatggttctgttgatgcatgccatcgttgggtttccttttcatgcgaggggattaagtatgacttactacatgatgagctgtcctttcgctgaacagattgtgaagaacagtgttaacaatgctcttcaagccgatcccactttagccgctggtcttatccgtatgttgttccacgactgtttcatcgaggtacttaacgttttctgtttaattaattgtgtttttttcgtagaaaaacccttaaaattaatgtgtaatttttggttcataataagggatgtgatgcgtcaattctgctagattcaacgaaagacaacactgcggaaaaggattcgcctgcgaatctgagtctacgtggctacgagatcatcgatgatgcaaaggagaaaatcgagaatagatgtccaggagttgtatcatgcgcagatatagttgccatggctgctagagatgctgtcttttgggtaatttatttgatcacgtttttgaattacctttatgtgattatagtaaatatgattaattagtgtacttaacataattagtaattgaaattgttaggctggtggtccatattatgacataccgaaaggaaggtttgatggtaaaagatcaaagatagaagatacaagaaatctaccttcaccttttcttaatgcctctcaactcattcaaacttttggccaacgtggtttcactccacaagatgttgttgctctctctggtcagttctttaaagaactaatatatgtgtattgtgtgtgataatctaatttggttttaacttaataatttgtggggatatatatataggagcacataccctaggagttgcacgatgctcctccttcaaggctagacttaccgtcccagactcttcattagactcgacttttgcaaacactctctctaaaacatgcagcgcgggtgacaatgcagagcaaccctttgatgctacgcgcaacgatttcgacaatgcttacttcaatgcgcttcagatgaaatcaggagtcctcttttcagaccaaactttattcaacacaccaaggaccaggaatcttgttaacggctatgcacttaaccaagccaagttcttctttgatttccaacaggccatgcgcaagatgagcaatcttgatgttaaacttggctctcaaggtgaagtccgtcaaaattgtcggagtattaattaggctagaccacatctacttacgatttttgtatttataataagttctctactcttgttatatgaagaatcatgaatcttctaggctactatgtaaaaattgtgtactctcgtaatatgcagttgtatacttattgcttgtgtggttcagatatccatcaaaaagtaatatactttggttgcattttcttgtccaattgctatttaaaggcaaaagtctccttttcttctgaacaatctccggatctagaaatcacatgataacacagaaaccggtaagaaaagaaacctgacgcacggtgaaaaagaataattgatgggatacatatttgtgaatcaagtgcgcaacaatcctcaagtggtgagcttaagacatgtttgggttttagctttcaacaacattcaaatcctttttcatcatataacacttacaaacccaatctgatcctcatgtattcacttaagaaccaataatatggagcagcagaagctaaaaccctcaataaatacagagaaaaacaaaatacagaaaaaacattcgtgtttcgaatcttatcttggacccgaggggtattcgttttcgatctgggaagtggaatcgccaatgatccagccagacacggctggatggtgggttgggtagttgaaatcttgtctgaacatttcctccttttgccactcttcccatctctcagctaaaccatctccttcaagcattcttacaacttcagacattttgggtctttccattggtgaactctgagtgcagagtaaagccacttggattagctgctccacttcttcgtctttgtaattaccctgaagatcaacatctactagtgcttccaatttcttctcttttaacaaccctttcacctgtcgaaatgaataattaacacaaatagaggtaacacagataatgaactatacaagtgggaaactcatatatgtatatacccagtctagtaacatgacatcatcatcattcgcgaggcgagcaagatcaaaagccctttgtccagtgataagctcaagaagcatgactccatacccaaagacatcggttttctctgatgattttccagtggaaaggtactcaggggctatatgaccaattgtcccacgcactgcggttgtcacatgtgtgtctttgtagtccatgagttttgcaagtccaaaatccccaaccacggcttcaaactcttcatccaacaaaatatttgcagctttcacatctcgatgaataatctttgggtcgcaatgatcatgtaaatacgcaagccctcttgcagatcccaacgcaatacgctgtctctttggccaatcaagtggtggctgggactcgggacgttctaaggagaaaataaaatataagattactacggataaaaaggcaaccattggacggaaatattgcagtcaaagaaaaaggcacaagatgagagatacctcttaaacaggaggcaacacttccattagccatgtagggataaacaagcaatctttcggttggagtcatgcaaaatccacgaagccgaagcaagtttctgtgaaccgccatactaatcatctcaacctctgtctggaactgcagttcgccaccttgggtgcgctcctcttttagccttttaacggccactaaagtaccatcagctaaccgtcctttataaactttaccaaaaccacctctacccaatatgttcttgttgctaaaattatccgaagcaacttgtagttcacgcaatgaaaacctcttcagttgtcctaaatgaacttctgggtcctcttcagctgcaaaaagacggtaataaaaaaaaatcagcaagagaagtgttaatgaggaaacaggtaaagcaagtttagctaacctggtacatcaaagaagtggtcctgcggctttttccttcgccaccaagctagtgcaatggccggaacagcaaatagaagtgcagcacctgcagcaactcctcccgcaatcgctccagtaattctattactccctgcaagaatgaaatgaacaatctctttcttaatacttaatggatctgcttaaaatgtttacttattcagttgaataacatttcaaagacaaagacatatacaaaaaaaaacctgcaggtgatggcggtgtaggagagataggaggcggtggagatgcaggaaggggagtcaacttggtgttggcaaaactgcaaaatttcaaataattaatcaaacattctgacctctccaccaagatttaaactaggagcaggatgcaaaacctgattggagtgaaaagtgaaaaggaaccattaacaggaatatctccggtgagaggattgtttgagagatccctgcattataagatgatatcattttctgacttaatgccaagatcggccaaacaataatcagaaacatgaacacagaggaatttgagagagataaagttacactcacagaacttgtagcgtcaggacagcagtcaaagaccttggaatttctccagataagctattgttattaagacgcctaaccaccaatacaaaaagagaatgtcatgaataagtggaaatacattaaccagtaatgagtttatagtgagagcaaaaatacaaactttaaaagactttcaaaagtaggggttgttctaaaatctcatccaacagatatgaagctgattgaaaaatcaagtatattttcctaattagcgcgacttactactttagatgcgttcaccctctagatttacagagcactcacaaattaataagtaacaatagggtttagcgcttaaattctaaggcagaagaatattgttatctttgatagaatttcattcttccagaaccaaatcgatttcatacaaaataagcgagtcaataactaccattgaagatcacaaaggtgacacacgagaacaaccaaaaagacagtcacctgaattcggaactttgtgttgttccagtaaaattaagcgaacacaaggatagagttctgattccttttacgaaagctcataattaaaatagaccatattatacaacatcctagtctccaagagaacaccttttcatctagtaaaataacgtagcatctatttggcgacactactttctgactcctacaaatgtaacacgttgcacgaatagcttttacaggaagacaaacacgatcaaggaaactaaagacaataattaggctgcttattaaaaacgtattaaaagaagagagtagaatatggtgcatacaagaaacggagtttcttaagtcggccgagagttgatggaataggcccgcttaaattgttcaagtaaagatccaagctcaccaattccgtcagatttccaagctgttctgggattgtcccagtaatgttattgctataaagctccctgtcattaccattctttaatattaatttcaccataagatcggaaagatatataactaataatctatgataatgcaaaattatgcagttatttggaacattgtaacatttttaacatcccacatacaccaaaagttaaaagacggccttttaaagaaaagatgacttacaagtactgcaagtttggaagctgaccaagttgcattacgagctgtccagatagatttgcattcccaaggtcactgagcaaaaatgaagttcaagtaaattctcagtagatgcgaaaatccgaatcatcttggctagatatagaaagaaacttacacacgtgtaacactattgtcgctattgcaagtaacatgaaaccatgtacatggagtaacaagagtagcatcccaactttgaagcaccttattagggtcggctaaactgtttttcagtgcacttagagcatcacctacaattaaccaaagaagaagaaaaaatcaaactttgcaatcatcaagtgtcacgaggatacataatcactggaatcagtcgaaacagatgtaacccaaatataactcaagtcaatacagcaaaacaagtaacagataagttaaaaatgccttctttaggtgagaacaagctctcataagcctatactaatcaaaatactcaacaagggaaactaatttaattggaaagaatgaaaaattgaaagagaatgagagagaaaggggaaaccttcggcgttgcccgagactctgagaaccaaatccaaaacgagaatcaaccaaaagaagcaagggatcattaatcttcgttccattttatcctcaagagattaaaaacaaaccctagaactatccctcatcagagaaaatccatcattgttaaaacccctgataaaagggatctcgaatccttcgattaagctaccacccacacaaggtaataccaagatgatgaaattagaagcagaatacgagaaaagccctctcaacgcgtatccacccgttgacttaatttgaagagaaaatcaaaatacccaaatcgattaatcgcggaaaccaaaaaagcaaaaaaaaaagaaactgaagctagacttttccgattagaaggaacgccgagatcgctgaccgttgactacttaatgctgagaagagagaaaactgagatagagaaaacgaaaggaggaagaagatatttcctggaaatatactaaaaaagggtcgaaacaaagagagatgagagagaggagagaaaccaagttatcgccgagagcaaggaaggaagacgaattttaattattttctttgcttaaagaagggattttactgggttgagttgttgtactgtgaaaactatattaaaaaaatgacatttaagattgagaaaacgacaaagaggatgatgacgtggacgagcattttcaaagcttttttagagctagtcaaagtcaaagacgcacgacttcattccgaatcatgtttgttatgttcgcccaccttatcatcatccatcatatgacattagatataaaccatgatggtcatgaactcatgatagttgatagtgagttatataccatcatcataatcctaattaccggcccagctctattttttcgggcttttattgtttattgggcttggtcttaatagcaagttcgtttattccaaagatgagcaaaagcttttttgatttttttattcttttttaaagattatagctctaaaaaattacaattcaatattgaaaaatgtaagctgaataatccatctggtccaatgaattaaacaaaacaaaaaacattattgtatcatatataatttactggttgatagtttaactatttatgccatttaatatttttaaaagaacaaaagtaattttgaggaaaaatgaaataaaaaacaaaaaacacaaacggacagagtatatgttgccagcaataaaatacggacatataccttagtttggcattaaaaaacaaaacaaaaacacaacaaacaactcagtacagtaggctatttaaaggcccatcagattaagacttggaagtctgacgagattgtaacgcctcacaatccttcctacccgtgagtccgtgaccgattgtgtatcatccatcttctttcttcttctttcttcttctttcttcttcttttatatataaaccaaaatataattcgtgaagactttcactttctccttgccactttttgacgattcacatgcaccatccaatattttagtgcccttttcacgacatatctgtgtctgtatccaattttcttatttactactacttttttctatttatatatacaaaaataatcaaagagagagacgaattttcgaggtaaggtatctatcgactttctatcttcctccacctttgtttgttgtcaccaccacactacgctaatcattgccacacacatgcataattctctccaaccatctaaaagtcccactttagcattcttctgtttgtaattttatctcagagcttgcttcatgggcttttgagttttctctctgtttccaaaaaacaatggaaccggagaagaatccgaccacagtattgagtgccattacaagaccttcgtgggcgtttcttctccttgttttcaccgtcttagcgattctctctctccaaatctcttccaattcttttctccctctctggatcccgacttctcaatatgacgaccctgttacctgctccgggtttttcaatcacgacccgttccctaaccggatcgttatgtcgattaccgatttcggcggtgttggagacggaaagacgtcgaacacggccgctttccgccgcgccgtaaggcaccttgaaggttttgcggcggagggtggggcccagctcaatgtcccggagggcacgtggctttctggaagcttcaacctcaccagcaatttcacgctctttctcgaacgcggcgctctcattttgggatccaaggttatatcaaagttttgaattctttaacacattgataaagtttactttttttttgctttgtttgttgttgattggttctgaacagtagtagtattaagagaattcaattagttgttgattgctctgtgagaatccaaaatttgggtttgtgattgctttttgatttgtgggttcataaagttttgttggtaaacactatattcatttcgctaatcacggtcagtggttaaaatggacccaccattgtttgatacagcaaaaaagctgttatttttgagtggggatagtctctagtagtgcgaaatctggatttgcatatcaaaagtcagtgttttgcatgaattttgtattaacacttgttaatttcggattgacttgttcaatgaatgttcttgtgatgtctcgatagtagctgtaacaaaaaaaaagtcaagtggaagaaaccatttttatatgatcatattccaagaaaggagttagatgtatagacaacttttgtctgaagcatgttcatgtacgaactagatctatcagattacttgtgttgtctcctaatttagtattaaattattactgagtttttttgctgtcaagtttgattctgattaaaagtttgtctgctagtgtttgagcacattttcatgtgtcgatgtaaactcaaaagtcatctgtacttatatagatactttggaacgctgttttttttaattcttacattcttaattttacgttgtaagtacaatattgatatttttgtctggaattatggtttgataggacctagacgaatggccgataatagagccattgccttcttatggaagagggagagagagacctggtggtagacacatcagcctcattcatggagacaatctcactaatgttgtcattacaggtactttgttatttcattcatcaacagtaggctttttgttcaatcattagctggagcttgtatgaattgttgggtttcattgaacaatttggcctgctttctctgatttgttaagaatactacttgaatgtttctgataccttgacatcaattataattctagaattcaatccagtatccaagtacgccatcaacttcttggcttttctgtttatttttctccttggttcagtgtctgtacttagattctctgtgatgatcaaagtaaaatcagtttctaattctaatcacatctaaaataaaaatctgcaggagaaaatgggacaattgatggacaggggaaaatgtggtgggagttatggtggaacagaacattggtgcatacgagaggccatcttattgaactcaagaactctcataatatcctcatctctaacctcactttgctcaattctcctttctggacaatccatcctgtttattgcaggttctttattactttcaactatctttcctgcgtttatactgtgttagaagtatgcatggttcgatgacctctgtaacttttgttttgcagtaatgttgttattagaaatatgaccatccttgctccgatgaatgctcctaacaccgacggtatagatccaggtaaatcctctgttctgtattacctttatcttgtgtctactttgtaatgacccttgtttaggccttgattgcatcatatgccaatctctgcgttttctttttgcagactcaagcaccaatgtctgcattgaggattgttacatcgaaagtggtgatgatcttgtagctgtaaagagcgggtgggatcaatatggaatggctgtggcacgtccgagttcaaacatcgtaatccgaagaatctctggtactactcgcacttgttcaggagttgggataggcagtgagatgtctggtgggattttcaacataaccgttgaagatattcacgtctgggattctgcggctgggctccgcataaaaacagataaagggagaggtgggtacatttcgaatatcacctttaataatgtgttattggagaaagtgaaagttccgattagattcagcagtggctcaaatgatcactcagacgataaatgggatccgaaagctcttccgagagtaaaagggatttacattagcaatgttgtgagtctgaattcgagaaaggcccctatgttgctcggtgttgaaggcacatcgtttcaagacgtatgcttgaggaatgttacgcttcttgggttaccgaagaccgagaaatggaaatgcaaggatgtttctggttacgcgagtgacgtttttcctctgtcatgtccacagttgttgcagaagaaaggttcaatagctcagtgttcatatagatgaggtttgagaaagtttttttttttgggtaaagatagagagaggaggccatgagttcgatcaagtttttttgagtgaagattcatggtcacttacgaaaaatgttaaatcttggatttcctttttcacatttttttgttcgtgttttgaatcttgattctttttatacatacattgtgtaacgaaatatactttgaattattccataaaagattttttcttattcatttttaccgtcgtgtccttctctatcactacgtttgtttttcacccactacaaaaaatattgcatttaggtgcatgaaagcgtcgtccttggtcaatagattagtttttctacataacgacgtaacgaattatcttagaatgaaaatttgagttatctgccgtcgttttttgtatagctaattggacattggaaatagatgaccgcacggtccgcaccaaaacaaatattatatacgttggttttcagcaagtccgtaaaacaagcaccgagaaaatgatttatcgtccgtctctttggccaacaccatgcaagtacttgtctagtgatggtctaatgtaactaacgcactaaaaatatcatatgaaatgtgatttctgatacaagctcccatttagataacaattgtggaatacaccgttttttttttttttttgggtctaaatacacttagaaaagttagttagcatatctttctttgagcatatctttgtgtatacgtatttgttacatgattctgtatcaaacaataaaccatgcatgcaatatactgatgatatagacaaacttatatgtgtatgtatattcaccaatcttaattaagtgcatgtgatacacgtatagatacacacctacatgttatggatatgtatatatttgaatgatataggaaatgagagttataattgatagaagatccatatgagagtttaaggaagcaaaaggctgaaaatgatgcctaaccctaatgatagaaacccttaaaagctttgacttgtgatgttataacctaagaagctaatccaacaccaagaaaatcaatgaaagtaacatcgttcttctcaccatcatctcccatggatggtccatcttcatttgaagtcatcttatgatctggtgtggctgcatgaaatgtgtaattctgaggatccaccaactctttcgactttctcctctcaagataaatttcgtggtgtacgttagagacagatgaagatccaaattgaccattcgtaggtggtgaaacaaaagagtaaggccagagaccgcaactcttatcctttcgatacctccatagcccgaaatgggatctatttagccttgtaagactagaactagggctcaaaacagtatgccaagtttggttgaacgtagaagtagccgtggaagagaagttttcccgtttgcgtctagccatgatgacatgaaaatggtttttgacagcgttgtcggtcctcccggggaacagtcgggctatggaggcccaacgattcccttggatccgatgagctttaagcagtctctcttcttcctcctcggtgaagggtttcttggtgatgtttggatcaagttggttgtaccatcttaatctacagcttttccctatgattccatattgacgctcaattatttataaaacacatagatttaagtaatatgattagatacatatatataaagaaatatcaatatatatatattgattacctgatcttccatagagatgttgagcaataaaattccagttcttgggaccgtattgttcaacgagttgccggagattgtcatcttcaacaggtctccagtgacctctttggcaactaggcttcttattgtcaaaactgttgcttcctctagacatctccatggatgctatctctatctccaccgtacctatatcaaaccaattagcaattgttgaagaaagaggtataagatagattagtctaaggtgaaatgataacaaggatgaaaattaatacaaagaggaagaaaaacaaaaaggaataaaaaagagagggttggtcttggttctctcctctagggttatagatgataagtcacttttcttctttttacaagacaccctctcctttttatataatataattattatacccatctcaacagaaactcttttttaagaacaaacttatactacttctttgtactagttcttgtttcatagagatatacataatactaataccaacatgagcctctacgtacttaagttatgtagttctttttataatctatatatacgtgtttgtaaataaataccgttttgaattgctctagctagtcccaaagtacgtactttatatttatagtcgtcgcgtatatatatatatatgcatcttactacctacatcttacgaggttatactaatcattttcaaaaagaagctaatgatcttgatgcttctgaacttcaacagctagctagatttgatcacgaccaacctgcattgacgatcattcttattatgttttgtttattttccgacaattatacttattattttccaaaacatgtttattttgttgtattccactttactgttggtactttcaaagatgcaagtagttgtaaatcgaataaaaaacaaacgacaagtcttctaaatatagcagtcatcgtcattggttgctgtaaataaacatggtatatgtgatatagatatacctttacaagttaagcataatttaatatttctgttaacacagaattatgcgattaatttaacatgttaggtggtattgtttgaatgatatataccagaatttgagtataaatctaatgtgttaaccatcaatcataagaattatatagtataacatgatctcggacctagagagaatatgagacaaagatgtgaatttttgttattataagaaaacaaatagatttctgttacaatatagttatcaaaatgtctcttttttttggtaaaaattatcacaatgtatcttctttatttatgtaggtcgactcatctaagtaaggcctcaagccttgtgatattcacataaaagtgaagtaacctttctcagcttcggtgacgaatccactctgccttttgttctagaatctgttttgttttctcaagatttattacatcttggtaatacaggttactagcgatgcccgtggtgaaattctagcatgattaaagacaagtttggttttggtatatcactttgacgaagtaaatggtattagtcaaaatagggggcacacaacacataatttagactttttttatgtatattattcatatacatagtcacacatgcacaaaactttctctcgtaactttttcttgttttctataatttaattatactaatcaatacttggggacgtacttacaacctggagttttctccaaacattctttattttccctttgggaaaacagaggtttactcgtattcaactctagttcgagccctcctaactacattaccctctgcagagctatattatcacaatttttcacaaattattagcaaataatcgacttttcattacctctatatatatatagaggtaataaagaaaaaaatccttagcaaaggaagttaagaaccaatttgatcaatgtaagacgattgtttggctttaatgaaatctgagatggtggctgcatcaccatgtctgaccactctaccgttctccatatacacagctccatccgcatacttgagctcctctaacctatgtgtcacccataatgccgtcacatctcctttctttgcatttatcagatcttttacagctttgatcacacccatctgcagaacaaaaaccccgagaaaacaatatgcactgattaaaaaaggcgtatacgtcataacatatctgtcaaattcatttcatttcttctagatactatatcaattgtgcaagttactcacttccaatgtctactataacacaatcatatgtcgatgttgaaatattccagttatggaagggttcccttgcaatactagttgtgtttcattagcacgttgttagaattaatcaaaccttacctggtcagactcatctaggaaagttgtgagctcatccaacaatagcactttgcacgcttcagctaaagcaccagcaatggcaattctttgtttctgaccaccactgagagtttgaatcggtctctggaaacaacaccaaaatctatactttagtaaaaggaactagaagatataaacaacttattgttgttcaatgtacataaactgacctgcatataatcacgcataccaacagcctccaaagctttaatcaccctagacttaacttcttcctgattcatgtcatgatacttgccaagaccaaatgccacatcagcttccactgtaggcatcactacctgcgatgaacaagaacgttcagatgtgaccagaatgagcggttttacttgaatcaaaatccaactgttactaactgatctccctcagatgtgacaacaaaatgactcttctcgatgtcattagcatatctagcttttcgaggataattaaagatttggattaaggctgtctgtgatatggaaaaagacgctcaaccacacaagcctactcaactataaaacagcaatacaaatcagaaagaacacttcacaataaagaaaacaaagatgggaaaaaagtaagatccttcaagataaaatcaaacacatgattcacattgcaaaagcaagaaacttaacctgatgatcaggattctgaaatacaaaattcttcggcttctccacaaagacagtgccactggatggattcactacaccagctaaaatctgcagagttccaagcagttaatgtagatcaaacagtttaactggcatttctttgtaatcagtcttagttacacatacaaacagcatccaaagatttgaatgctctttgagtttcatgttataaatgccaagattagctattgcactaaacagtgtgatgatctaagattctgcccaaagtagcaactagcaaacctagtctacaccagattgaaggatgacttaagtaagaataatgatacttcattaacaaaagcttaagtctttgctctgcaaatgcaatgtttaagagaaaagagaaagaccttcaaaagggtggatttgccacagccattaggaccaagaatcatccacaattgtccagaaggaatccgaaaggagcaatcacggagaataggaacagatataccttgtcttgtactaacggagaaacagagattccgacactcaacggcgacattatcggagaatttgattctgtaactaccggatggagaaacactcgatgatatagagcgaagagggaagagacgaggaggagatgctgcaaataaacagtgaccattcatttctcttaaggattttcaagaattctctttaaagacttgaaattgcagcttccttcttcttcttcttcctcgcaaaaccataaaaataagcttcgtcgaatcgacacacaaaaaatacaagcaacagagaaaccgtagatactttctctcgttgcttcgcttgttcaatccaagccagtccggttttcaaatcgatatcatccggttcggtttgatacggtttgaggtttatttcgaattttatttcggttttctagtgccgacgttacggtataatttgaagctgagcgtttaaatttcgaaatcacatgtaatcatgaatttgctttcgaaatttaataattgggatttgactcacaaaaaattaaccatcaaaattatttatataacaaaataaataaataaaaaaggaaaaatagcagtgaaatattgaattttagtaagaatttaaaaaaattggaagcctattctgccgatcttgttgacttggctccatcttatgtttttcctctcaaatttatcggaacaattatttggttgtgtggttccaactaaataagcgaatatatttatcacgagagtcagacaaaatttggttaaatttttccaagtaatagagaatatatatcatcagtttttgaagcatggggatgtggtgtactactttgtttatggtttcttgtgtttccatctgtttaattctaagccatgttcaaggtattatattaaactcttttttattgactgtttgcaatttgcaatcaccaaaagaattgttgcaaacaaagaagaaaagcagctctagaacatgtcgacgcaattaaaaactatatggtattactaattttcttatatctataaactaacaatttgttttggttgatgacaaattagaggtagaagctggagcacctccccaagactgttggaatctcgtcactttccctgctaaatgcggcattcacggaaagaagaaatgcttcaaagaaatggaatcaaagtatcaacaacgttttcttcagtgcacatgtaaaaacttaaaaccggaacccaaatcacccaaggacgaacatgactgcacttgtcaaagagctaatccttatgaatgtaattcctaatcttataactttttagaaatttcagccatcaatactaacatattatttattaattaataataagaaaactatggtgttaagatcccaatttttcaatcacaacgaaaggcaataacaattttatttaattaacatgtttcactatcgagtttttttttttgggtcggattgatttaggttcaggttgaaagaacatgtattcaagacttagataccatgaaagaaattttttgacgtagattatgaatttactatttagtcacgccttcggatatatgttcttaagattgatatgttctaaaaccggttagattgtgcttcacaatggtttttccttctttaatgtatgtaaaaacatctaatatcctttttaagtattcagatatttacaaaaagaccaaggagtataggaaaactgaaaatcaaagagccaaaaaaaagaggttacaaattactaaattagaaaggagcggtatgaatgtcccaagcatgaggactcataaacatcattctttcgtcttcataatcatcatcatcctcctcatccttcagatttatgcatctccctcctctttcttcactagctcgtaacccctcatgcgtctcctgctaattttgttaattaattaacgttacgaagaaaaaaagaaaatttgaaggaactccaaaaactaaaattactgtaaatacgtacctttgtaaaaatatccatagcttcctccattgtttttgttttcatcacatacaatgcttcttctcgagcattttctaattgatcgagatgcaatgtcattggctctgtctctatcgaagacctcctctctaacatgtccattctcttgcttacttccatatctctcagattttatagcttgaaaaacaaaacaaaaagttttgatgaatatctctcaaagtcttttgattgattctatatataagaagaaagagtggattttattgaatgtaatgaatcttcgaaaatatctaacgtttttataagtacgatgtggggacgtaagtgagagacaagaagatatatgacgcaacgtggcgtggtggggcggattacggcggtggattgggaacacgtggcgtgtgaaggatggtggtgaccatgcacgtggcggattagtttgtgagattgcgaatgcgatttttcgatttgcatgaagactgcagatagataacgtaacgagataattcttctactacttcttcccacgatttttattctttctagtattttattaaatggagttggtcggcgtgatgagatattttcgtttctttttaataatgatacaagaataagtacgtggaacaacttaggtgtgacggtcatccgttttggactcatttgataggtcactagaaatagctgtccctgatttaaatatataagcaaaaaccataatcatttctgtttacataactttaattttctaatcaacaatgtttacaatgatatttttacaaaagaaaacataagtaggcaggcagtttaagacgactaagatgcagaacttctcaaacaaattcaccttataagcaatgaatgcttttggctctctgaattgcatctcgcacctttctcattggttcatcgtacaagtaagctgggttatcaaactctgatgccaagctatcttctccaagcaatgctcgaaacgagtctgccacagatgatgaaagtgattcaagattgtatcctccttccaagaaaaacacacaccgccctccgcatacttcttttgctaaccgctttatatcttttgccaatgagtagtatgttgcggtcgtgaactgtaaatttgctagtggatccaggacatgagcatcataccttaagcagattaaagcaatgaagcagaagtgtttgtaagaatacgatgatatattcagttcaaaaatagatgaaaaacgttataaactcactcacccagcagaaacaagaataatatctggcttgaaccgttgagcacatggaacaatgatttcttcaaaaacggttctcattgcaatatcacctgaacctccaggcaaaggtaaatttagagtggtaccttcaccttttcctttacctatgtcactgattttccctgttccagggtagcttccgtcctgcatttttcagaaaataaataacttttgttgatttctgaaatctaatcctaactatgcgttattcaatcaatgatcttaacactttagttgaacattcatgtgttatttagtcaatgattttgaaatacaaggtatggatcatttgtcaatgaactaattagaaacatgtcacgcaaaaatgttagaggcttacctgatgagttgacaaaaagaatatatcagggtcctcagtaaatgcatcatttgtgccattcccgtggtgaacatcgaagtcaattatgaagatgcgcttcagaccatgtgtgcgttgggcatgacgagctgcgattgccacattaccaaaaacacagaaccccatcggaccttttggcacggcgtggtgcccaggaggtcttatcaatgcaaaaccaatgggtggatctacgctgtttctggatgctgcgatctgaaacaaataatcatataagaaatctacaaccattcccaacataatgaaactgaagcagtaaaagcagactaacatggtgagacgagacatcaccactgaatcaactaaagccattccggctcctgctgcgataagtgaatcttggaatgtctggcacagagggaagatgtttaggtaggtaaaatggttcctttggagatgttaccggatgagcacaaagcagttaccgttgaagtggcatatgttggtccagagccttcaatgaaaattagtcccgaatctgaagcctcatccattgcctacactaagaatgtctttgtaatggtcagaataaaaatcgtaccgtacatcctcatttttcaatcctacttgctttgctatatgtgtcaatgtattggttatgaaataaaaagttgtgagtaaatgctaataatataacatgagtaaagttaataaccttttctaggccaaagacataagccttgtcgtgaacatttgcaatgtcttctacagttgcagtcttgaaatttgcgagttcaagaatctgtgagccacggaactgaaatacacaaggaaaaaagattcacatatgagaattcattgatagaagacgtaggtcattttcagtaaatagtgacagagatcttcaccatcgaagaagcaaaccaacaaaaggaagaatggtgtatacaacaaaagcagacctataaatacatcaaacatatttcgaaaagaatctacttgtttgagaagaaatgtgcaagtctatctaactaactccagaaaagtacaaaatttcagctaatgtaactttacacaagcattatgttggtctccatccacttgagatttgccttaaatattgtaaatcacggttaaccaaacttccctagctacatgtgcataatatagaagaatgtcagatagaaacgatagagatggattgtttcataccttaggagtgagctcattcatctcgagagcattaacaatggcaggaactctagcgctgcattctggatgtgattcctgcgagtaaaagattgcttaaatgaatgtgaaaaaaggattgagagggacagaaacaacaaaatatagcaagtaaaaaccttgttatgacccaatgctgcagatacactgtatatgagacgagcatcggctaactgctggatagatggtaatagaggattcttctctgtactaaatgagcaattaatggatgatccactgggtttcagaagatacttcctccattgatttttcttgcatatgtttctactcccagaaattccagcacttcctaaggcaattaaaatgtcatatatcatttcatttccgatataaagaaaaacagtgagaacatgatatggaatctaatcactcctgtagttgaaacaatatgcacataaaacctttgacgcccatttttatgttataaaaatgaaaaggaggagcaaacgaaacatccccagaatcagattgtcgcttttctttacacaaattgtttaagatcggaaaattatctaatggattacagagaagagagcttttagccgaaaacaaaggcactgaacagaagaaagaagagaaaattaccaggaacaaagaatggccggacaattagcgccatggacatgagtttccctcaagctcagaggttactactgaaggcagccataaaaaaaaagattaaaagaaaaacaagactttgtttgatattctttgttaaatggataggctttctacggtcctactcccacaagagctgagcacgcataacatatattattgatgtattagtgaaaactgaaaagaatccttcggtttacaagtaggtgcatggtcatttggagggacttctgtttcggtaatgatcgaacccaattgtcaacaagagagatttggaaaggcaaaatgagtttttctaagagaaaatttagattacatggcattgcaattatggaatacaaaaagaaagctaagtagtccctatgaaaacatcaaattctttccccaagcagtgattccaggagagccgcctcttcctcctgcacaaacattacttaccacgttcaatatcattttattaaatacctcttaacttaaaagtttgttgaattctctacgtaccaccaaggcattgaattcggtttcctcgtctatggcgctgatcacagctggatcgtctaagagttcctgcaaccacccattaacattcgagtggtgagcttacttcattcatattgaccatcacacacaaatcttatttaggattataagcactcctctcttctaaaaaacagagaaccaataatcaccaagttgtgtttcccttaactctatattgtctactaaacatcattagtttgtccgccaagacctatcacaaatctacttggatcaaattccaaaagtctcttctttggatgaattcacagattttccaagtctggtggtgtaacttttgctcaaaacctttttataacccaaccaaattgcagaggagaaaaagtacataattgaggttcgacttacatcatcagcgatttgcagcagcccattttgatcctgcatagataaaattgccattcatcactctgtttttattctacagtagtcctaaggttccatatttcttctataaaagtaacatctgaaaactgctacagctcggcaaaactttcacaataaacaactaaagataacaagcttaccttagcagcaacaaagagaagtggatctgaaggtgtgtagaccatatagtgtgatccatcctgaatcagaatttatatttagacgaggaaaaaggggccacatcatacctcaaaggtttcatgttctacagaattcaaacaataaaattcacaaccagtctgttttcacaaccagattgcagtggtgaactttggatccacaatggcaaatacaaacttggttcagagataaattgaatgacaggtttagtgtttaaaagtatgctataatagtgatatctcaaaagattgttcaaaatactatataaagcgcctcaaacatatcaataagcaaaatgccaaaagcaatagtataccagatggaaacacgtaatctcaaccccttcagttggcaagccttcaacatcttggccatcatctgcaaatagttgatgctcgaaacatttagtaatatgaaaaagtaggacacataatttaaactataagcatatgagcagacccgtcaaaacacctaacagttagaacgaagcagatcgagagaactaaacataaggaagaatgaagataaccacataattttactaagatgcaattgcaagtacacatgaccatgagattgaaatttgacacataaatataaaatcatgataaaatatatccaccgtatatgaagccaaaatcatttagtgtgctcatatagagcagacgccacaaaaacattaatcagaagtattttcgtcatgcgtaaaaatcagaagaaaagggtgttgcctgtgcgaaaatcaaagacattatcttccgtgtagcaaaagcctccccttgcagtgtaacagaacctgatttacagtgataacccattagatggtatcagacacaaagaagagacataggataataaatgatgtcatgcttgaaacagggcacggtcatacccgctgtgtactagatgcatatggatctttgcaagagcataagcagcagcaggaagaagagattcgacctcttcatcactgacctaaaaggcagaacgatcctagataagcaaaagacaggtcctgatcgaagcaactttcatctagaaactgactattctacaattaattaatattcgagttctcaaaagcatagtgtcatgcatccagaaggtctctctacatcaggagatgtgcagtcttgaagaaacacatgaagaaagattcattaaggataaaacttacagctgaccatccatcaatatttgtgctcttcaaaatctgaactggcctgaagcaagaaattaatcaatcaaacggaaaagaagaagttgctaaaatggtaagagaagaagaaaaacagtacttacgtatccacagggcaaagaagcatacaatcctctcctttactacttgtaaatactcttcttatcacacaatccaaagggctattgtttgttggatcaatctgtctcacaacacaaacatttttagattctctttttcccaaacaccaaaacttataatgttcatgaaaaaagtgacactttagactcaccacagtggtgatacgcttcttagaggccataagaaccctaccagtttcattaatcacaaacccagcaggtggtttgggtatggtaggaggagagttaaaagttgctagagaactcgaagaagaagaataatcggcatcatcatcttcctcaaaagcgtcttctgaatctctcaattcccaatcctccacaggtttcgcaattttcccctttttcttacgtttcttgttcgtactactcttatcactaccggtggaggccttcttcgtcggctgtcccgtctgtggattcaaagcggaggtgatgaggagacgaagatggcgggtattcttcggagatgagactgataacgagacgggaaacgaagaagacgggttgagaaattgatgggtactggaataggagagagtcgaatttggtgacggagaagttaaagagtatgagaaagccatggaagagagaaagtgagaaacttgagtctcctttcaaagttgagagagtgagcaaagtgatttcgccggcaacggagatatttgtggtaaagttgtgattttttcgagtaagaagaaacttcacaacagtcaaaactaaatttctacttaaaaagtttaaagtcactttgtaatataagtatcatcatgtaactcaattgtcataggatttgatccaatcagtacatacaaatatctaattacaactatgagctcttgcttgtcccaactatatataacattctcagtattcatatacttgagctgcttttagtgaagcaagttcatcgcaatccactggcatccacccgattgattgtttctcgttatcgtagattatcatctgatcttgcatcgatatatctgttcaatagaaaggagaaacattgatttaatctcgaaaccaagataaggaaattgccaatgtatgtaatataaagactgtaccgccgatgaggtttaggttctggagacctatttctgtgccattcaagattcccaaacatacattccccttcatctgcaacattttaatgaatcgtccttttagcattgtgtgagaaaaccaaaccttggagcggatagtaaaccggatggagtgatgcttacagaaatgattagataagcttctgggggtatctcaaacagagtttttgatctccagcctgttttgaagctaagagctagaggcttgaaatacttcttgacttcttcaatgctcatgaatggtctacgtccttgccagcatagaggcagcgtgtggtcatcccgtgcttctttcaacggttttccgcttagttctctctttagctacaaacagaacaaaaatactttatgaaaaactggtctcttctctctttatcttccaaggttacagcaagttccttaccaaatatgttacggcttggtatgccttggaattgaagtatgtgtaagaacttccactgtcaaatactgttaatagattcttcaatcctgttgttcttcccccgaatagaagttcccctcccattgcaggagagtagtgttttctgagaaagaaagtttcaagattatagcaaaaagagagaaagaaatgatcggtaaacgataaaaataagagaagagctatctaattacgagtattcacgagacattggtgtccatgagactcttgaagaatcataaagatcgtcgccaaaaaagagaattcctccacctaaactgcttaggcaatgaccgataacattctttacataaccttggctatgaagctgtgacagaatgcttactttccccctaccaagccctaatactccatctagaggatgatgactcgaagcccctgggatttgatcgtatccacaactgttacacaaaaaactccaattaggatttactaggaactacaattgctaaaatcaaactgaacattgccggtccaagattgtagaaatagatatataccctagagcaagacggggagtgagccggagaccctgtgtatagttcatagagaagacatctctaacaagaacaccgagagaagatcctccatcagcatactcaacctcatagtcacattgctctggagtctcacatctctgattactattcaaatgcaaagccttacacagtggatcattgcaaggaataagatcactactaggctgatacagtggatgaggcgcctgaaataaataaaaaagttcgtaagatgaaactatgacattggatccagagaataacagaactgaagatgaaattattatgatacctccaagcaacgaacacaaggagcatcacattggagccaagtgagatcactaccagtatcaagatcaagataataaggtcttggtggttgtcctatgttgatggttacattatagtacctgtttcaaccaaaataaattgttttagagaatttctgaaatgagggaacgcacgcaataattttgtgaagttgagtttgcaaatatatagattacccaagaggataaacgttgccatgaactgggaacacgactgaagaaacagctctggtgaatctatctgagaatcctgcagttttcctccatctgaaatcaactgccgacgaaaaacccagaaccagagacattaccatcaacacaatcataaaacggacattcattttctccatcttttcacggcttgtggcaaaataataaaataaagagaaaattttatttgtattagccaatcacgtgatgctgatgttgaagtttgaaaacgacaaaggccaagacatttacgaattgaagatatttattacaaagaattgtctttttgttgatgcataagcaaagaaacctttttaaatttggtttgcaatatgtagacaggtaataaggattcttggcttaaaccataggggacttgagcaaaaaatattccaggttgtttcttagtatctgcgaaaatcaagaatcgagttaaggaatattgctgatgagaaagggtagagccaaagtatatcttgcagctgaagtaagcaatcttgcaggcatcttcttcgattcaaattgattcagaacaatgagtgagattcacaatcattaatccatccaagtgaataagcaccttttcacaatcttcgattcttcgtcatcatcatcatcatcatcagtccacttctagctttctggatacaaatctgccattacagaagaaaacgataaatttcaaagctcaaaagcatcttcatttggctattaacaaaccagaggaaagatacagagacataaagatcttacagtgatgcgcagagaatgagagtgtagatgaaacaacggtcaagaaaatcgtatgttcattcgacatcatcttcatcatccaatccatctctgtagcgaaccaactctgcatcaaccttagcctttctaggactcatcaaaacaagctcagctaatctcctcctagctaaataaacatcattcggttctaccaattcccctctcttatacccctctctaagaaacaccgtatgaagcttcccgtaatttcctcgagtcgatatgtaaaatatcccctgatgttgcaaaagaaactctttcaatttcttaggcaaattcatcacattcctaaaatgagcaattctctcaagcgtgatcttcttctccacagtcaaagacagcaattcatgaatacaagcaacagatctcttctctaatcgattctgcgcttccatcgatctcaaatcgtaacccgatatatcctcatacggtgaccaataaggaagcctctgccatttccaaacagcaattcgaaaatactttccaatcttaaatccaggaggaaaattcacaacgaatgagaatcgaacatcctctgcatcaattccttttgttctatactcaatctctctaactctctctattgcacaaatcgataaattaggatccttttccacaatctcaatgtacttatctcgagtctcttcaccatcaatgagtctaaagaactgtggatgtttcagaatcacagagtactcgaaatcttcagggagtccaaactcagtccgagcaatcctgacatgttcaagacggatccgacccgtattcgacatcataacgagtttcctcaaccgggtcacggcgtcgggtatttggtcgagaacagcttcgtgttcgtgacggatttgatccaaagctttacgggttaatcgacaatagaggattctttgaactgggtgctcgtatatctcaaacacgtgtgggaacttgaggagaaaagcacctggttcgtgttgcttgaagccgagacctagacgacgagcgagcgtgtctagaagagagattgcgattgtgtggttgggttgagagagaatcaagctgtgaaatttgacgactttgcggatttttttctccacttccatgtaattgtcgtagccatggtcacgaactcgatcctgttttttgggaatggtggtggattgagagaagggtttaacgagaattaaattgattgaaggaagaatcgtcgtcgctagttttctcttagggtttaaggttttaaaagcatttctaagaaaaagcttcatccttttttttgttttgtctgagaaggccttagagcaagtcacaagggttgagtaatattgtactgtgtttactaggtttgggtcggaaactggatatcgggtcagatccaggactgatccggctcacatatatagctcaggaatgcaaacttactccagtgtacatcgtttcaatgaaatttttggaaaaactagaatggtgttgtgaatgtgtgcggctctctccattatttacaattaataggaagatgcatatttatgtagagacaattttcacgaatgaaatgatgacggtaacagcatcaagtttaccacctttgtgtccattgtatccttcttctttagctgcgtcagcaaatggcgttctctctgtcttagatcgtcctacttcttgtgcttttgcagctaccaactctgctattttctgttacaccgcacaaacattaatcaaactcatatatccccaacacattgataacagcacatttcatctcaaaaccatttgaaaacgagagctaagtgactcgtacacaactaacacccgccgaaactacttgttcaaccaaaaagaggagataattcaagaccattgagcacctgaggttccagactctgtttcagtgacccgcaaactattgaaacgatttctttttcgtataagttatcaaagagcccatcagttgctgcgatgacaacatcgccttcttccaggttcacatggtaaacctgcaaattgtgtaaagcaagaccacttatgttgcacatattctggtgtagatgaaccattcaagagtgtctgttacttgaaaataaagatttcttgcttaagtaacgacatcgtacctctgcaagttttaggacatcacagccttgcgtaatatgcaagggaaaacaaaaatgatgaaacattggagacgaattctgcaatactgtgccatccctaatgaccatgaatcccgaatctccaatattggctatgtggagttcctacaaagtaattttacatgatcacagactgactctatctcaaaaggatttccaatgcaatatatatgttagggaccaagtctcacattattgtcaagatgagcaattaaggctgttgatgatccagaggacttagtctcattgacacttctatggagaacttgaactgggtcacttatcttagcagtttcattggaaataatcttttcacagttgctcatgagttcttgagcatacattcccttattgattcctgaaagatgaatcaaacatatattcggcaaggccaaatacaagtgactgagtttctgcaagaatttggaaaactatgtgaaaatacttatatacagtatttaccttcaaatgaccactgagagactccatcagcaatacctatccaattgtggtgagagataaaataagcatcttcccgacctgccaatgcctggacatcattatttctaaattactaaccacataacataagtatagggatttaaaattcaaaaattgtcagaatgttaaaaatgatgtttttgaggtggttggaaatgagaacaagatatgaaagatcttgagatatagagtgttaataattaatatttcaacaactgtctcttatttttgtgtatactaaacagaaagaattacaggtaccttaaaggggctttggagtgaagcaaaaccagagtccaagtaaaatgctttggacacaagttcttccctgtttagatgtcaaacatccaaccatagcaaaacaatcatgcttttataaaagctgcaatatgattcctagccctgtatgaaaatatgaatagatacatacatatatgcatgtagctgtatctgtgcaagacaatagtacagtttgtctaagaagagttaaatatatcacttactaacctgccagaagccgctttaatgggttcaagactggccgtttcaggtacaggaagttggagatcttccacttttgtgtcatcattattggatatgctaccactatcagttattgtgtccctcacagttatttcatcttctgtggttgaagctacattttctccatcattttccttcatgaatgataagtaattagagtggtggcactaattctgttcaacaacactctctgatgtctctttccttctacacctgttaaaactacttaatggtttagagttagtactcaccacatcagacgtaacaactacaagcttttcagtgctctcgtcaacgctactatgcactgcttctggttcaacaaaagtttccatagggtttttctcagacgtatcaataataggcttttgagcgatctcatcaacgctgtgacgtgttgcttctgaagttgaaatgagttcatcagaagagacagcagctgtagctgttggttcaactacaggattctcctcagcttcaaaagtgttcagaaggttttcctcagacgtatcaattacaggtttttgagcaatctcatcaacgctgcgatgtgttgcttctgaagttgaaaggagttcatcaggagacaaatcatctgtagctgttggttccgcgacaagattctcctcagcttcaataggcttttccgtcacatccaaattgtcatcaatttcaatggtggatacaggcgtaatttcctgttgtgtagacaatgacggtcttgcctgaacctccatacgattctcttgataaccatttgtctcacagtctcctattttattgacagaaactttcttcatggcttcagaagaaagaggctctacattatatgacttagccgtgatttccttctcaacaacagcttcttcttcagtagagctaattggaatagcttctgctacactaactatggagctcagattggaaacactagcactcttggcatcaattttatcttcgctccgtgatacattcacagtttctttcttcttcttagtaggagaacgaacccttttacgatcctttattttaatgacattgctaagatcggaaggagcagctgtttcctctttctcagtacttgtttcaataatagaactgaccaatttcttttgtttccttgaaacttcactggcttcttcagcaatcttagcattttgcgtttctacctcaacacatctcgctttttcttcagcctcgagatatttctcaatctcacttgcatccccgaaccgaaagacatgacttccatctttaagctctgcaagatccaaacaactatcaatataagagtatagctcagatttcaaagtaaataacttttctattcttaaacttgaaactaaaaaatattttaggttttgatacttgaatccgaagtaaaattggttacaacctagtaattgagtgttcagacacttcaaaaattagggaaaaaactaaaattcaaaacttctccggtgaaggaagataaaacaaaagaagaagaggaaacacgaagacttacgagtgctggacacgagatcgaacttctctggagcagaattctccggtggagaagaagaggaagctgaagactttgaaggtgaaatggaattagccaactgtagctgagaggacaatcggaactcaggaacggaatatctgattccaccgggaaatctccatgaacggtgaagagaacaagggaagatgagaaaaggaggagcttgaagagaaagaatcaaatgatcggccataacttaaacattgaagtctgtaacaaagagtgtcacagaaatggtttagagtagacgaagaagatgataattgggtgacgttacaaccggtggtaaccctctgtttctatcagatgtgttcgcttcacagatattttgtggctaccgtttttttttcataattgggctataaaaatcatatctttttgactcttctcttctctatccattctctgccgaactagtcgtcaatcgaaatcccaaagatcagcgatggtgactctaaacgcttcttctcctctcacgaccaagtcgttcctcccctaccgtcacgctcctcgccgtccaatctctttctcccctgtcttcgccgttcattcgactgaccccaagaaatctacccaatcagcctccgcttcggttaaatggagtctagagagttggaagtcgaagaaagctttgcaattgccggattatcctgatcagaaggatgttgattcggttctacagacgctttcttcttttcctcctatagttttcgctggtgaggctaggaaactagaggataagcttggtcaagcggctatgggtcaagcctttatgcttcaaggtggtgattgtgctgagagtttcaaggaatttaacgctaataacattagagacacctttagggttcttcttcagatgggtgttgttctcatgttcggtggccagttaccagttatcaaggtcgattctttacctggagatttttctgtgtgatgaatctctagttagggatagtttatgattttgtgggttttaagttttcaggtgggaagaatggctggtcagtttgcgaagccgagatcagacccatttgaggagaaagatggtgtgaagctgccgagttacagaggagataacataaatggtgatgcttttgatgagaaatcgaggattcctgatcctcataggatggttagagcgtacacacagtctgtggctacgttgaatctcttgagagcatttgctactggaggttatgcagctatgcagagagttagccagtggaaccttgatttcacgcaacatagtgaacagggtgacaggtttataaacttctctccttgtttataatcttgtttgttatgatgttaaccaattgagaatacacttttcttaagtcagaaacggtttcttatttcttgatgttgttgtgacaaaacaggtaccgtgaattggctaatagagttgatgaggctttgggattcatgggtgcagctggacttactagtgctcacccgatcatgactactactgagttttggacatcccatgagtgtttgttattgccttatgagcaagcactcacaagagaggattcaacatctggactttactatgattgctctgcgcacatgctttgggttggagaacgaactcgccaacttgatggtgctcatgttgagtttctgaggggaatcgctaaccccctcggaatcaaggtatgtgatcatcaagtctcttggtttggttaattggaataggagtaagtttcatagctttgttcgtatagaaaaaaacactgagatgtagactcaagaactgttgttaactctataggataccctgcaggtctcaattgcctggtattaaagatattggaaaaccattacaaagaggctacaacagatttttgtatgagaaaatgacagatgttgattgatgtactttgatgcaggtgagtgataaaatggtccctagtgaactggttaagctgatagagatactaaaccctcagaacaagcctggaaggattacggttatagtgagaatgggagctgagaatatgcgggtcaagcttcctaatttgatcagagcagtccgtggagccggtcagattgtgacttgggttagtgatccaatgcacggaaacacaatcatggctcctggtgggctaaaaactcgttctttcgatgcaatcagggtaatcattcgaacttacttcttcatccaactctatgcataatcttgcttatgattcatgtagttacccattaaattatatggtgtatcaggcggaattgagagcgttcttcgacgtccatgatcaagaagggagtttccctggcggggttcatttagaaatgactggtcaaaacgtgacagaatgtgtcggagggtcacgcaccatcacttacaacgatctaagctcacgctaccacactcactgtgacccaagactcaacgcatctcagtctctggagcttgcattcatcattgcagagcgtctgcgaaagagaaggcttggttccgggaatcttccgtcatctattggagtctagagaacaagaaaatacttatccgagctaggatgtgtgtgtatagaggctgatctctacttattaagttgccaagttaaatgagcttgtgtactgttaaaagtaagatattgttgtttttgtgtgttgggttatgattttgtctgaaataagtggctgactttataaacccgtaaatctctacgtcacgcttgcaacaaaaattcgatatttgattcaatcacagaaaagtcctcccattaaggtgtaaatttttgactcaaataccacaaagcataaaccttttgacaaaccaaaagttgtatgaagaaaattggaaaactctgaatgccatttccacacgtggacactattcgtttagagaacacttaaacaaacgcaggaggcctggaaaaaagaaagataacgggactcgagagattgagattacggagccacccactttcatggagtctacactctcagctttctcaaccgtcaaggcaacagcgatggctcgaagtagtggtggtccttcattacctctcctcactatttctaaagcacttaaccgccactttaccggcgccagacacctccatcctttattgctcgctcgctgttctccctccgtgcgacgtcttggtgggtttcatggcagtcgatttacttcgtcgaattcagctttgagaagcttgggagctgctgttttgccggtaatccgacaccgtttagagtgtttgtcgagctcatcgccgtctttcaggagtatctcaagtggcggcggttctggatttggggggtataatggtggaagcggcggtggtggtggcggaggatcggagagtggtgattccaagtcaaaactgggtgctaatgcaagtgatggtgtctctgttccgtcgtcagatatcattattctcgatgttggagtaggttcttctctctctttctatatgattttggattcactccagtagtgtaatgttactaacatggatgttctgctctattgaaggggatgacatgtggagggtgttcagcaagtgtgaagaagatactggaaagccaagtaagtgtcaaagatctttactttacttgctcttcttactctcctggtctgcttctctcagcctaagaccaaattgatgtgttctgtctcaaagaatggttgcccttgcccgattatttatattaaaaatctctcttttcttgtttttttttttctttgctgtatagcctcaagttgcttcagctagtgttaatctcaccaccgagacggcaattgtgtggcctgtaccggaagctaaaagtgtacctgattggcaaaagagtttaggcgagacgcttgcaaaccatctgaccaattgcgggtttcagtctactcctcgaggtgagagaggatgcagtttctgtttgtcaagttttctttttgagaatgcatgcctaacataagcaattattagcattttgtttgtgactcttagtattttttggtgatccttttcttcttcttttttgctgaaagtagcgtttatacaccctgcccaaaggtggatggagtcatgatcacttattttcccttacctgcttgtttaggtcctttctgtagtctcacggctcttgtttgtttctttgacctgcatactatatttgtctttgtgttttgaaaatttctgaaacttgtcgcagtctagtgtctagagggttcctttggaatcaatcaggtaactaatctagagatgaaagcttagctagcattctagcaagatgattgcatgaggcagagcaaactttacgggtgaacttggacgttattatagtgtgcctaaatttttcccataattgggttaactcttgatgtatcgaaatatagtaccaagagttctagtgcttcaataatgctaattgacttgaagtaaaaacaagaaaaactcatcatctttttgcaaatccggtggatacttgtgggataggggaagttcctgaagatattgcaggagagtttgcaccttgatagtacaaaagatttttccagcagcaatcattattgatatggtatgttttttgtttaagggatttgaaaagttgtccattatcgatttgagtctattgtggactagttttaactctactaacttgattactgctcctttcacagatgattaagagcagctgctcatggcgaatggattgtaaacctaaatttctggtgctagtagttccatttatgttgattttgttgtcagtccttgtgatctaagggcgtgtatttatcttctgttgtcgattgctgacataccttctccgaaccagacagcataactctgtagtgatgatcttgttctattatggtcgattttccaaaagaatacattgaaagctataaaattccatattattccaaggcatttgatttttgttttgacagtggaccttcgttcaatcatggttttcttaactgacctgtccacttaatacaacattttagcttggctagggcaccctcttttctttgttctttgtaatctgtttcttttgttatctcatatcttagagtataggtagatctgcttatcaatcgcagaaaaaatctggatgcccctgctctttttagtctgggtattttacaattaactttcttggtatgagcactaagtatctatatttgttccagatttggtgacagagaatttcttcaaagttttcgaaacaaagacaaaagacaagcaggctcgcttaaaagagagtggtaaaaatggtttccccaaatttgatatgttcttataggaaattgatgttttgtttctgagatttgtatatctcttgattgttttataggccgcgagcttgctgtttcatgggccctatgtgctgtatgcttggttggccatttaactcactttctaggggttaatgctccctggattcatgcgatccattcaacggggtttcatgtgtctttatgtttgattacgttgcttggtcctggacgcaagctagtacttgatggtatcaagagtcttttaaaaggttccccaaacatgaacacgctagttggtcttggtgctttgtcatcattttctgttagctcactggcagccatgattccaaaattggtgagttaactactctttccctcacactctctactttccagttgaaagaagttttgttgtatggttccaagtgcttgaaaaagattatttggagttgaatgaatggtatgtagtagctgcgtctccttttcagtacaggctcgaatcattcaacagaacagtttggctgcattaacatattttaaaatcaaaggcataagtaataatgcttgtttttgttttctttctggatttttccttgtaagctgggagtatttaaacccttgacctccatatctatattggttcttgcgattgatggctgatattccaacctgtaaaactgttttgacatccagggctggaagacattttttgaggaaccagttatgttaatagcttttgtattgctgggaaggaatcttgaacagagagctaaaataaaagccaccagtgatatgactggccttctgagtgttttgccttcaaaagctcgccttctgcttgatggtgatctgcagaattcaactgttgaggttccttgtaatagtctctctgttggtgatctagtcgtcatactaccaggagtaagaagagagaactttcattctcatgcatagtatgttgttgtttcccatttagtgatattttactgcaagggatattctcattcatttttttgcaaacaacagcctattcaaatgtttttcttcgtgtatcctttttgttgacgcttgggttatgttttccttatttaccaggatcgagttccagcagatggtgtggtcaagtcaggtagaagcaccattgatgagtcaagtttcacaggtgaaccattgccagtgacaaaagagtcaggggtaactttctactccacccctatctatatctagtgtagcctgagatagatgagaatgttatcacgactgtttgggttgtctctttgcacatattatactcacgttttttttgttaaaaaatattttgggctagagtcaagtcgcagcaggatctataaacctgaacggaactcttactgtcgaagtgcatagatcagggggtgaaactgcagttggggacattattcgtctggttgaagaggctcagagtagagaagcaccagtacagcagttggttgacaaggtctctccttctttcctagtgcatttgaatatcagtttggactgaccttgatttcccatggaataaaaacctgtcaacaaaattcaaatatataaccaggactacaatttttttgcaactacaggtcgcagggcgcttcacgtatggagtgatggcactctctgcagctacatttacattctggaatctatttggtgcacatgttcttccttctgccttgcataatgggagcccaatgtctttggcccttcaactatcttgcagcgttctggtatacttctaagttctaatatatatacatattgattttaatgtttaatattttatgagatcaagaatatgcaaacaaagtttttgaaagcctattatacaatccctcaactgcagcctatgatatcaattgtaatatttagagagaatacggaggaaatttgtgtttcacttctgattctattaccttagtaattaaaattgatcaaagcaaggatggcttaaaaatagtttctccctcttttatttggatacaggttgtggcttgtccttgcgcccttgggttggctactccaacggcaatgctggtaatatttttactgcataaacagtttttctgctatgaatcagacagaataagacgttgaatatcttgatatattccttaggttggtacatcattaggagcaagaagaggattacttcttcgtggtggtgatattcttgaaaagttttccttggttgatactgttgtcttcgacaaaactgggacactgacgaagggacaccctgttgtgactgaagttattattcctgaaaatccaaggttaggcttctgggcacagcacttctatacttttaaatcatatttttgctgaagtcttgtactgtttcagattaattttttttctttcttgaaattttctacatacttctgtgttctgtgaaaacatctgactcttcatgttcttacgcagacacaatttgaatgatacttggtcagaagtagaggttttgatgttagcagctgctgttgagtcaaacactactcaccctgttgggaaagcgattgtaaaagcagcccgggctcgtaattgtcaaacaatgaaggtaggactgtaaatgataattatccccctatttatgataattatttccctagttttgatgaagttaatgaagtccaccactgcaggcagaggatggaacatttactgaagaaccagggtctggtgctgttgctattgtcaacaacaaaagggttacagttgggactctagaatgggtcaagaggtataatatgttcatcctttattcgtggtttgttaactagtttaggagtgatttggcacctgataagtagccattgtagtctcatatatctttcatgtttagtataatttatatctgtattgctgtttatacattttccgttgatgatgttgtccttgctgtcacaatttgatctacttttgctgcctggccattaatcaagattatacacatcttcttttttttttctctccaaagaattgtacatagagtacttaaggaacttatgaagctgaataatgaataaataatacatgataaaaaatatttttgacaagcataaggatgtggcaggattttaaactagaagaagatttatttttaatttgctcttccgctatgcagacatggagccaccgggaactcattgcttgcattagaagagcatgaaattaacaaccagtctgttgtgtatattggggtggataatacacttgctgcagtcatccgttttgaagataaagtcagggaggatgctgctcaagttgttgagaatttgactcgccagggaattgatgtgtacatgctgtctggtgacaagaggaatgctgccaattatgtagcttctgtcgtaggaattaatcatgaacgggtatgttcttcttctttaaatggattgattcaacttcttcagaagttttggcatgcattgtttgctaaaaggtggtacttggtgagaattaccaaacatctaaagtcatggcattgaatcagtgattgggctgtaggcataaacctcgttttgaacaaattaaaatatatctatattgactttcattagccagatttagttcctgcatcttaatccttaaaaaatgcctgatcgaatttgatatacaggttatagcaggagttaaaccagctgagaaaaagaattttatcaatgaacttcaaaaaaataagaagattgttgcaatggtgggggatggaataaacgatgctgctgctctggcatcatctaatgttggagtggccatgggtggtggtgcaggagcggccagtgaggtgtctcctgttgtcttgatgggcaatcggttaacacaggtttcgcatattatccccacaacacttgtacctttttcattttattgtgctataaaatgcgagatctgattgattactacatcaaatcatatagccactgctttattgatgaaacttagaacatgtttaagatttttggatttgtcgttatgcatcttcatctagttgtataaatttttgattgatgcgtaaaatcgctggtcataggaaactgcattttcttactaaatcaatgataatagatgtttccctttggctttcatgaatttggacacatgaacttagtagttacatgatttccatgcagttgcttgatgcgatggagctaagtcggcaaaccatgaagaccgtgaagcaaaacctttggtgggcgttcggatacaacattgtaagttgttctgcattttcatgtcttaatttcttgctttgagtttcagtgtgaatatataattagttaataatgtattttgtttaaaatacctatgtaggtaggaatcccaattgcggctggagtgttgctaccattgactggaaccatgttgactccatcaatggcgggggctctcatgggtgtaagctctctcggtgtcatgactaattccttacttctaaggtacagattcttctcgaaccgaaacgacaaaaatgtcaaaccggaaccaaaagagggaacaaaacagccacatgagaacacaagatggaagcaaagctcttagacggggaatttccacttcactgaggcactatatcatgatttttgcagagataaatctctttttagttttttacttttcattcttaacgataatttcggctcttggtcttgagagggtttgttaggacttagggtattgataatttggagaatcatctcaacgtgatttttcaaacaattgctttgagcttgtaacacagccacagtaacacatgtccaaactctgcattggctttggcatttgatactctgaaatttgattttgtgtataattatagtgaataagcagcgggatttcagttattttatgtacccagccgtgaatgatcatgtcacatacgaaatggagatacaaaatttatgtcacgtagcaaaactcattgcaagagcaagtccttcattctatattccaatactcaagactgggacaagccaatacaaatcaatcaataaataacaaacacagaatcaaatagcaactctcaatacaaaaaaatcattttgtttctcctgtacttttataactccatcacacttttgcaacaatgtgtaaaagaaaaaaaaaatctcttgaattggtaagtgtttcatgttcttcgacaattcatgagacttgcgagtagatgaaaaccagtagtttgatcggggtcttgttcataccatataagtcattccaacttgcatcaaatgtgtatgcggaacgcttaggtttgttatccctctcctggagttcttcctcaagaaagcatacaagtaatttattaccagcttcttcagaaaccaagaatccttagtagcccttatgtccccatgtcccagtagatacaccacccctgactctttcgctttgtgtataaacgacaattctttttctagactctgctccacatccaacgccgatgaaggacctgccccaaaatctatgctggcctttcttctctccatgggtcgcttgtttgacgaattcatgtgctcagctaagagaggcactccaagtgaatacacacttccattgggtgctatcagaactctggacagagtcgtatcatcctcagaatctgtatcattatggtctccgtcactctcaagtgcacgctcctgtgcttccttacgtataaatttttctagactctcaatcagtatctgctcaaacgcctggtgactttccttccgcacatctttgtatccatacctgttttaaatacacagcactttatatatgaaaatttggttattgtacctaaattttcttccatatcaaaaacggttcctttgtttacctggctacacagcggaataaatgatagcttcttgggcatacacgtctgaaaagaaatctctcggtctgaggcacacttggaacagggacatactttatacacacgaagataaccatggaatggattgcaggaagggtggttagaaaatgaccaaatattgccggaactcctttagctagctcattataaagtagaccaataccgggtgctctaattgtcccaaggttactgcccagttctcgtagtaggtccattggtagctttttctggacttcagtttcatacttcagtttactcccgtagttccaaacaaacattatgagaaacataattgtagcaaaaaccaagattatccaacttccatcagccacacttgaacaaacggatgagaagaaaaccagttcgactatcagggaaacaattgcaaacatgctcacaactatgatgttcgtctgccagataagaagcatgataagggtcaccaaaattgttgtagtcatcataattcccagctctgcgatgcctgaaaatccaaatccaaaaccacatgcatgaatgtctctaggattaatggacaagccacagaaaaagtggacataaaagttaaaaagtaaagaacaatgacggaaattacatcatctttataacacattaaacatcatgtaccagaacttatggttcaacaacttgtgccgtaaaactattttaaagtaactaaaacgggttccaattatttcaactttccccaaatcaaatgctacgagaagaaaatattaccataagcgtttccaatcgcgaagatatttgaggtagagcagacaacgatcagacacaccaccagaagggaccagttaagaaccggtatataaatctgtccaatgaatttctttgaggtgtgaatgattttaagacgtgggaaacagcctagtgctattgactgtttgatgcatgtaaatgtggctgttgtcattgcacgactggcaattaaagcagcaacattagaaatgagaaagactggccagaacaaagaacctgaaaataaaaaagagtgataaacagttagaaacgtgaaatgagaggtaaaatcaagccagcaaatgaaggaatacccttgttgatcttgacgtactgtggaagctagtggatcttacttggaactgacgaaaagaaagcatccccggcagcgctgaagttttcagagaggtatgcggcttgacccaaataacccagcaagaggcaaggtaacaccagaaggataaaagtaagctgcagataaacaccagtactgaatcaaaagttcagatgactctaagaaagacaactatcagaagagcaataaatgagtatttatctccttaaagtacctggatagagtgaacagagaaatagctaagatctgcaaacatggcctccgatcctgagacaagatccacatgtatagaaatgagcaatgacatttagtcaaaaagtcattcaatgtatttaagctttctaaaatatttcccagaatatgaaacttaccagttgcacataaaacgcaacccccaagtgcataccaagcatttacagagtttctcttgaaaaagaaatagatatatgcaggattgaacgctttaaaaacgctgctgtcatattttacgaggttgtaaattccaatgcccgctagacaaaaaaaccacagaagtaaagcaggacccaaaacaagccccaatttgctggttccatatttttgtacactgaacaagatcacaagaaagctgactgatatcacgaccacctgatctgcaaatgaagccatagtcagaaactttacacaaaaaatagtcactaatcactcatcaagataagattatgttttttgaaagctttgtacaatcattagcccctattcagggggcagaagagtttaccctcttctttgttgtatctataatctaattgaagtcaagggacccaggatgcaaccattaaagacccataaaaagttttctggtccaaggaatacatatatccaaggaacgattacaagttttgaaagccagacgaaatcatgctcgtgaccatacataggcgctaataaacgtcaactagaattagttaccttgttctataacaccaactccaaccttcagaccaccgatagcagacattactgtgtccaaaaaagagggtaaaatttagctgcagattattcatgcaacgataatgctcacatgctttttctctatacttgatatgtgacataggaacaaaaaatgtagcctgacagcatataagtacctgacattgctggcgtaacaacagcatcagcaatcaccatagcagtgccggcaagaactaaaatcagaagaagctttttcaaggccattgacgcctcaagtctttctttaattatcaatgatctttcaagttctggagacggaaccttcaaaccaaagcctgatatgcgagcatctgatggaagttgatttgggataaggctaacatttgcatgccggcagatcaacgaatacaaagcaaacgtcccacctgcaattcatttccaaaacttaaacctttaaaccttaaatgaacttcaatctacaccatataaagaggaagagatataccttcgccatcgtcattggcccaaagaacaaaatgtacatactttacaagaggaatcaatattaaagtgtatataaccaatgacaaggctccaataatatcttctttgtcgttaattggagatcttctgaacatgacagtgaaggtatacaatgggctagttccaatatcaccaaatacaaccccaagtgtctgcaaagcaagtatgagtttctttcctataccagtgtcctgaaaaaacacattaccaagttcaacaactcaatcagatcgaaaagtaaacaacatgaagaagaagaagaacattcacacacaaatgctaacctcgatttcgtttttctgagttccaggaatctcaagagcatctacatcgaaagagtcaacggcagggctagtgcgaatcaaacgctgctccacattgtcatcctcctcatcggaatccatttccgggtgattatgctcatcatatccatcatcgtcgtaatcttcattaacctcataatcatctttctcatcgaacacccatcgcgacaatgacgtcgttgaatcgtctccgccaaactcctcatcaatctcagacccatcgcctccactgctttcttcttccacgtgaaacatcaatcaccgttggaaaacactgaagatctcgagattgtgattcagattcgtatctctgatccaaggaaacaggattggaattggtgtttttgagagattgagagatggaagagagagattgatctacatacactggagaggacctggcacgaatgagaaagaagcttacacgtgtccaatcatgattggattcgagactcacggtttaaggaaaaacaaaccagaccaaattaggcttaaccgctaaaaaaccgggttctcgttttgaaagattgagagagacgatctacaaaggaggacaggacccggcacgaatgagaagaagcttacacgtgtccaatcaggattgaacgatttaatcaagcttaaccgtatgtaaaccggattttagctgggtccacaagtagtcaaatatagattttttaatagtcaaataattttcataggggcgaagttcaagatgagttactacactcatcaaagctcacaaaaagagaagagaagagacgaggatcaatcaccattctcatggcttcagcttctttctctgcggtttcttcgctctcgtatcaattccgttcaaaagaagcgatcttttcatcgaaagcttcctgttttagctcgacggctttatcaggaaggagagtgtttggatctatcaaagcagctcaagtgacaagccatgagaatcctagaagacgaactcagaacgtcgaaggagatatatttgttggtaaataaagtctggttactttttattgcaaattgaaaacaaagagagatcattaacgccctctctctgtctatctttcaatggatttttttgcagacaatacttgtattgattgtgatacatgtcgttggatggttccggtaagcttttcttctctgaaatctgtaaagctcctaaatttttctgctctttcccctgtcttgtggacccttttggtggtcctttgaaattgatgaattgatttaagcattttgggtctattggttggtagggtaaagtagttggggggttttcattttgggtattgggaagttgatgccttaggattgatctcgaagaaggatatactaacattagaatataatctgatttgatcacagtcattatatgagaacaagaagttagaatgttcatgttatagttgtttgttagcaggccaatgcagctgtgagagcaggattttactttccctttacatttttttcagccaattcgtaaacagcttttctctgatttatcttcacaggatttattcactcgagtggacaacatgtctgcggttacaaagcaaccaacttgtaaggaggaaagactgaatgctcttcaggtgccttaactacgtcgattttagttttctttctatttaatatctgatgacatttcattgaggatgtttttgaatctccttgtttttttgtctttgatagcttttattgttaccttataaaacagatagacaaattttgtggaaatgtctgctaggatgtcatagactgagaaatttcttatgaagaaaaatattttagtgagtaaaatttctgaggttgtcctgattactcatggtttcttgattctttcaggccttactatcttgtccgacgggctctattcgcactcaaactccacctgctgacataggggaagctcaagagacctttccacttgtagtggacaaagacacacttcctgtactttttaatcccttaagctttcatttttttaggatggttattaacaagtcaactaactctgattagatcattgtaagcatacgtaggttttgaatagatttagatacaatgaccttaagttcttaactgatttagctccactgaggactcttactaccttgttcttatatgttgtctgctgtccttgaggtttataaagtttgagatttgcattatgctcagggcgtttttcattgtggatttcattccaagaaatcgtatggagcaacttcttacctgatccttcatcgtgagggaaatatacttgttgataggtatatacccttgggaggaggcatcatgaattcttattttctttgttgtttagtatcttatacattgttgatgcaatgtatttcttgatatacttcgttgtggctattaactctacacaactgattaaaccaaggttttgctgtttgctgcagtcctaggtacgtggagaaacttgctggaaagatcgagatgaagggtggtgttcgctacatgtttttgacacacaggtagaattgataacacctaaaggagaaaatccgtgttttctcttgtaatctctgttaatcaggataagcgatttcattgttcagggatgatgttgcagatcacaagaaatgggcagacagattcaagtctaccagaattctgcattctgatgatgtatgtccttgaatttttcacacctctctgcacattcttgataggttttttcaacatctagatttcgtgaaaaatgaaaaagcttgcttacatagttacaagaaccttgggctgcttatatgctctgtagaaaatagaaaaagattatgaggttggataaaagtaaaaagtaaactagccacgcaaacaattttgttactaaacccatctctgatcgaccattaagggaattttttttttgttaggttgaaccttcgacctctgatgtggagttaaagctggaaggaagtggaccatggagtatctatgaagatgtcgaacttatacacactcctggtcattcagaagtaagtttgtccaactgcaagaacatacataaaaacaaatgttcaatttttgttaaaaagaattc

SEQ ID NO: 663 - DNA, 98124 bp, Arabidopsis thaliana
gctgttttgccggtaatccgacaccgtttagagtgtttgtcgagctcatcgccgtctttcaggagtatctcaagtggcggcggttctggatttggggggtataatggtggaagcggcggtggtggtggcggaggatcggagagtggtgattccaagtcaaaactgggtgctaatgcaagtgatggtgtctctgttccgtcgtcagatatcattattctcgatgttggagtaggttcttctctctctttctatatgattttggattcactccagtagtgtaatgttactaacatggatgttctgctctattgaaggggatgacatgtggagggtgttcagcaagtgtgaagaagatactggaaagccaagtaagtgtcaaagatctttactttacttgctcttcttactctcctggtctgcttctctcagcctaagaccaaattgatgtgttctgtctcaaagaatggttgcccttgcccgattatttatattaaaaatctctcttttcttgtttttttttttctttgctgtatagcctcaagttgcttcagctagtgttaatctcaccaccgagacggcaattgtgtggcctgtaccggaagctaaaagtgtacctgattggcaaaagagtttaggcgagacgcttgcaaaccatctgaccaattgcgggtttcagtctactcctcgaggtgagagaggatgcagtttctgtttgtcaagttttctttttgagaatgcatgcctaacataagcaattattagcattttgtttgtgactcttagtattttttggtgatccttttcttcttcttttttgctgaaagtagcgtttatacaccctgcccaaaggtggatggagtcatgatcacttattttcccttacctgcttgtttaggtcctttctgtagtctcacggctcttgtttgtttctttgacctgcatactatatttgtctttgtgttttgaaaatttctgaaacttgtcgcagtctagtgtctagagggttcctttggaatcaatcaggtaactaatctagagatgaaagcttagctagcattctagcaagatgattgcatgaggcagagcaaactttacgggtgaacttggacgttattatagtgtgcctaaatttttcccataattgggttaactcttgatgtatcgaaatatagtaccaagagttctagtgcttcaataatgctaattgacttgaagtaaaaacaagaaaaactcatcatctttttgcaaatccggtggatacttgtgggataggggaagttcctgaagatattgcaggagagtttgcaccttgatagtacaaaagatttttccagcagcaatcattattgatatggtatgttttttgtttaagggatttgaaaagttgtccattatcgatttgagtctattgtggactagttttaactctactaacttgattactgctcctttcacagatgattaagagcagctgctcatggcgaatggattgtaaacctaaatttctggtgctagtagttccatttatgttgattttgttgtcagtccttgtgatctaagggcgtgtatttatcttctgttgtcgattgctgacataccttctccgaaccagacagcataactctgtagtgatgatcttgttctattatggtcgattttccaaaagaatacattgaaagctataaaattccatattattccaaggcatttgatttttgttttgacagtggaccttcgttcaatcatggttttcttaactgacctgtccacttaatacaacattttagcttggctagggcaccctcttttctttgttctttgtaatctgtttcttttgttatctcatatcttagagtataggtagatctgcttatcaatcgcagaaaaaatctggatgcccctgctctttttagtctgggtattttacaattaactttcttggtatgagcactaagtatctatatttgttccagatttggtgacagagaatttcttcaaagttttcgaaacaaagacaaaagacaagcaggctcgcttaaaagagagtggtaaaaatggtttccccaaatttgatatgttcttataggaaattgatgttttgtttctgagatttgtatatctcttgattgttttataggccgcgagcttgctgtttcatgggccctatgtgctgtatgcttggttggccatttaactcactttctaggggttaatgctccctggattcatgcgatccattcaacggggtttcatgtgtctttatgtttgattacgttgcttggtcctggacgcaagctagtacttgatggtatcaagagtcttttaaaaggttccccaaacatgaacacgctagttggtcttggtgctttgtcatcattttctgttagctcactggcagccatgattccaaaattggtgagttaactactctttccctcacactctctactttccagttgaaagaagttttgttgtatggttccaagtgcttgaaaaagattatttggagttgaatgaatggtatgtagtagctgcgtctccttttcagtacaggctcgaatcattcaacagaacagtttggctgcattaacatattttaaaatcaaaggcataagtaataatgcttgtttttgttttctttctggatttttccttgtaagctgggagtatttaaacccttgacctccatatctatattggttcttgcgattgatggctgatattccaacctgtaaaactgttttgacatccagggctggaagacattttttgaggaaccagttatgttaatagcttttgtattgctgggaaggaatcttgaacagagagctaaaataaaagccaccagtgatatgactggccttctgagtgttttgccttcaaaagctcgccttctgcttgatggtgatctgcagaattcaactgttgaggttccttgtaatagtctctctgttggtgatctagtcgtcatactaccaggagtaagaagagagaactttcattctcatgcatagtatgttgttgtttcccatttagtgatattttactgcaagggatattctcattcatttttttgcaaacaacagcctattcaaatgtttttcttcgtgtatcctttttgttgacgcttgggttatgttttccttatttaccaggatcgagttccagcagatggtgtggtcaagtcaggtagaagcaccattgatgagtcaagtttcacaggtgaaccattgccagtgacaaaagagtcaggggtaactttctactccacccctatctatatctagtgtagcctgagatagatgagaatgttatcacgactgtttgggttgtctctttgcacatattatactcacgttttttttgttaaaaaatattttgggctagagtcaagtcgcagcaggatctataaacctgaacggaactcttactgtcgaagtgcatagatcagggggtgaaactgcagttggggacattattcgtctggttgaagaggctcagagtagagaagcaccagtacagcagttggttgacaaggtctctccttctttcctagtgcatttgaatatcagtttggactgaccttgatttcccatggaataaaaacctgtcaacaaaattcaaatatataaccaggactacaatttttttgcaactacaggtcgcagggcgcttcacgtatggagtgatggcactctctgcagctacatttacattctggaatctatttggtgcacatgttcttccttctgccttgcataatgggagcccaatgtctttggcccttcaactatcttgcagcgttctggtatacttctaagttctaatatatatacatattgattttaatgtttaatattttatgagatcaagaatatgcaaacaaagtttttgaaagcctattatacaatccctcaactgcagcctatgatatcaattgtaatatttagagagaatacggaggaaatttgtgtttcacttctgattctattaccttagtaattaaaattgatcaaagcaaggatggcttaaaaatagtttctccctcttttatttggatacaggttgtggcttgtccttgcgcccttgggttggctactccaacggcaatgctggtaatatttttactgcataaacagtttttctgctatgaatcagacagaataagacgttgaatatcttgatatattccttaggttggtacatcattaggagcaagaagaggattacttcttcgtggtggtgatattcttgaaaagttttccttggttgatactgttgtcttcgacaaaactgggacactgacgaagggacaccctgttgtgactgaagttattattcctgaaaatccaaggttaggcttctgggcacagcacttctatacttttaaatcatatttttgctgaagtcttgtactgtttcagattaattttttttctttcttgaaattttctacatacttctgtgttctgtgaaaacatctgactcttcatgttcttacgcagacacaatttgaatgatacttggtcagaagtagaggttttgatgttagcagctgctgttgagtcaaacactactcaccctgttgggaaagcgattgtaaaagcagcccgggctcgtaattgtcaaacaatgaaggtaggactgtaaatgataattatccccctatttatgataattatttccctagttttgatgaagttaatgaagtccaccactgcaggcagaggatggaacatttactgaagaaccagggtctggtgctgttgctattgtcaacaacaaaagggttacagttgggactctagaatgggtcaagaggtataatatgttcatcctttattcgtggtttgttaactagtttaggagtgatttggcacctgataagtagccattgtagtctcatatatctttcatgtttagtataatttatatctgtattgctgtttatacattttccgttgatgatgttgtccttgctgtcacaatttgatctacttttgctgcctggccattaatcaagattatacacatcttcttttttttttctctccaaagaattgtacatagagtacttaaggaacttatgaagctgaataatgaataaataatacatgataaaaaatatttttgacaagcataaggatgtggcaggattttaaactagaagaagatttatttttaatttgctcttccgctatgcagacatggagccaccgggaactcattgcttgcattagaagagcatgaaattaacaaccagtctgttgtgtatattggggtggataatacacttgctgcagtcatccgttttgaagataaagtcagggaggatgctgctcaagttgttgagaatttgactcgccagggaattgatgtgtacatgctgtctggtgacaagaggaatgctgccaattatgtagcttctgtcgtaggaattaatcatgaacgggtatgttcttcttctttaaatggattgattcaacttcttcagaagttttggcatgcattgtttgctaaaaggtggtacttggtgagaattaccaaacatctaaagtcatggcattgaatcagtgattgggctgtaggcataaacctcgttttgaacaaattaaaatatatctatattgactttcattagccagatttagttcctgcatcttaatccttaaaaaatgcctgatcgaatttgatatacaggttatagcaggagttaaaccagctgagaaaaagaattttatcaatgaacttcaaaaaaataagaagattgttgcaatggtgggggatggaataaacgatgctgctgctctggcatcatctaatgttggagtggccatgggtggtggtgcaggagcggccagtgaggtgtctcctgttgtcttgatgggcaatcggttaacacaggtttcgcatattatccccacaacacttgtacctttttcattttattgtgctataaaatgcgagatctgattgattactacatcaaatcatatagccactgctttattgatgaaacttagaacatgtttaagatttttggatttgtcgttatgcatcttcatctagttgtataaatttttgattgatgcgtaaaatcgctggtcataggaaactgcattttcttactaaatcaatgataatagatgtttccctttggctttcatgaatttggacacatgaacttagtagttacatgatttccatgcagttgcttgatgcgatggagctaagtcggcaaaccatgaagaccgtgaagcaaaacctttggtgggcgttcggatacaacattgtaagttgttctgcattttcatgtcttaatttcttgctttgagtttcagtgtgaatatataattagttaataatgtattttgtttaaaatacctatgtaggtaggaatcccaattgcggctggagtgttgctaccattgactggaaccatgttgactccatcaatggcgggggctctcatgggtgtaagctctctcggtgtcatgactaattccttacttctaaggtacagattcttctcgaaccgaaacgacaaaaatgtcaaaccggaaccaaaagagggaacaaaacagccacatgagaacacaagatggaagcaaagctcttagacggggaatttccacttcactgaggcactatatcatgatttttgcagagataaatctctttttagttttttacttttcattcttaacgataatttcggctcttggtcttgagagggtttgttaggacttagggtattgataatttggagaatcatctcaacgtgatttttcaaacaattgctttgagcttgtaacacagccacagtaacacatgtccaaactctgcattggctttggcatttgatactctgaaatttgattttgtgtataattatagtgaataagcagcgggatttcagttattttatgtacccagccgtgaatgatcatgtcacatacgaaatggagatacaaaatttatgtcacgtagcaaaactcattgcaagagcaagtccttcattctatattccaatactcaagactgggacaagccaatacaaatcaatcaataaataacaaacacagaatcaaatagcaactctcaatacaaaaaaatcattttgtttctcctgtacttttataactccatcacacttttgcaacaatgtgtaaaagaaaaaaaaaatctcttgaattggtaagtgtttcatgttcttcgacaattcatgagacttgcgagtagatgaaaaccagtagtttgatcggggtcttgttcataccatataagtcattccaacttgcatcaaatgtgtatgcggaacgcttaggtttgttatccctctcctggagttcttcctcaagaaagcatacaagtaatttattaccagcttcttcagaaaccaagaatccttagtagcccttatgtccccatgtcccagtagatacaccacccctgactctttcgctttgtgtataaacgacaattctttttctagactctgctccacatccaacgccgatgaaggacctgccccaaaatctatgctggcctttcttctctccatgggtcgcttgtttgacgaattcatgtgctcagctaagagaggcactccaagtgaatacacacttccattgggtgctatcagaactctggacagagtcgtatcatcctcagaatctgtatcattatggtctccgtcactctcaagtgcacgctcctgtgcttccttacgtataaatttttctagactctcaatcagtatctgctcaaacgcctggtgactttccttccgcacatctttgtatccatacctgttttaaatacacagcactttatatatgaaaatttggttattgtacctaaattttcttccatatcaaaaacggttcctttgtttacctggctacacagcggaataaatgatagcttcttgggcatacacgtctgaaaagaaatctctcggtctgaggcacacttggaacagggacatactttatacacacgaagataaccatggaatggattgcaggaagggtggttagaaaatgaccaaatattgccggaactcctttagctagctcattataaagtagaccaataccgggtgctctaattgtcccaaggttactgcccagttctcgtagtaggtccattggtagctttttctggacttcagtttcatacttcagtttactcccgtagttccaaacaaacattatgagaaacataattgtagcaaaaaccaagattatccaacttccatcagccacacttgaacaaacggatgagaagaaaaccagttcgactatcagggaaacaattgcaaacatgctcacaactatgatgttcgtctgccagataagaagcatgataagggtcaccaaaattgttgtagtcatcataattcccagctctgcgatgcctgaaaatccaaatccaaaaccacatgcatgaatgtctctaggattaatggacaagccacagaaaaagtggacataaaagttaaaaagtaaagaacaatgacggaaattacatcatctttataacacattaaacatcatgtaccagaacttatggttcaacaacttgtgccgtaaaactattttaaagtaactaaaacgggttccaattatttcaactttccccaaatcaaatgctacgagaagaaaatattaccataagcgtttccaatcgcgaagatatttgaggtagagcagacaacgatcagacacaccaccagaagggaccagttaagaaccggtatataaatctgtccaatgaatttctttgaggtgtgaatgattttaagacgtgggaaacagcctagtgctattgactgtttgatgcatgtaaatgtggctgttgtcattgcacgactggcaattaaagcagcaacattagaaatgagaaagactggccagaacaaagaacctgaaaataaaaaagagtgataaacagttagaaacgtgaaatgagaggtaaaatcaagccagcaaatgaaggaatacccttgttgatcttgacgtactgtggaagctagtggatcttacttggaactgacgaaaagaaagcatccccggcagcgctggaagttttcagagaggtatgcggcttgacccaaataacccagcaagaggcaaggtaacaccagaaggataaaagtaagctgcagataaacaccagtactgaatcaaaagttcagatgactctaagaaagacaactatcagaagagcaataaatgagtatttatctccttaaagtacctggatagagtgaacagagaaatagctaagatctgcaaacatggcctccgatcctgagacaagatccacatgtatagaaatgagcaatgacatttagtcaaaaagtcattcaatgtatttaagctttctaaaatatttcccagaatatgaaacttaccagttgcacataaaacgcaacccccaagtgcataccaagcatttacagagtttctcttgaaaaagaaatagatatatgcaggattgaacgctttaaaaacgctgctgtcatattttacgaggttgtaaattccaatgcccgctagacaaaaaaaccacagaagtaaagcaggacccaaaacaagccccaatttgctggttccatatttttgtacactgaacaagatcacaagaaagctgactgatatcacgaccacctgatctgcaaatgaagccatagtcagaaactttacacaaaaaatagtcactaatcactcatcaagataagattatgttttttgaaagctttgtacaatcattagcccctattcagggggcagaagagtttaccctcttctttgttgtatctataatctaattgaagtcaagggacccaggatgcaaccattaaagacccataaaaagttttctggtccaaggaatacatatatccaaggaacgattacaagttttgaaagccagacgaaatcatgctcgtgaccatacataggcgctaataaacgtcaactagaattagttaccttgttctataacaccaactccaaccttcagaccaccgatagcagacattactgtgtccaaaaaagagggtaaaatttagctgcagattattcatgcaacgataatgctcacatgctttttctctatacttgatatgtgacataggaacaaaaaatgtagcctgacagcatataagtacctgacattgctggcgtaacaacagcatcagcaatcaccatagcagtgccggcaagaactaaaatcagaagaagctttttcaaggccattgacgcctcaagtctttctttaattatcaatgatctttcaagttctggagacggaaccttcaaaccaaagcctgatatgcgagcatctgatggaagttgatttgggataaggctaacatttgcatgccggcagatcaacgaatacaaagcaaacgtcccacctgcaattcatttccaaaacttaaacctttaaaccttaaatgaacttcaatctacaccatataaagaggaagagatataccttcgccatcgtcattggcccaaagaacaaaatgtacatactttacaagaggaatcaatattaaagtgtatataaccaatgacaaggctccaataatatcttctttgtcgttaattggagatcttctgaacatgacagtgaaggtatacaatgggctagttccaatatcaccaaatacaaccccaagtgtctgcaaagcaagtatgagtttctttcctataccagtgtcctgaaaaaacacattaccaagttcaacaactcaatcagatcgaaaagtaaacaacatgaagaagaagaagaacattcacacacaaatgctaacctcgatttcgtttttctgagttccaggaatctcaagagcatctacatcgaaagagtcaacggcagggctagtgcgaatcaaacgctgctccacattgtcatcctcctcatcggaatccatttccgggtgattatgctcatcatatccatcatcgtcgtaatcttcattaacctcataatcatctttctcatcgaacacccatcgcgacaatgacgtcgttgaatcgtctccgccaaactcctcatcaatctcagacccatcgcctccactgctttcttcttccacgtgaaacatcaatcaccgttggaaaacactgaagatctcgagattgtgattcagattcgtatctctgatccaaggaaacaggattggaattggtgtttttgagagattgagagatggaagagagagattgatctacatacactggagaggacctggcacgaatgagaaagaagcttacacgtgtccaatcatgattggattcgagactcacggtttaaggaaaaacaaaccagaccaaattaggcttaaccgctaaaaaaccgggttctcgttttgaaagattgagagagacgatctacaaaggaggacaggacccggcacgaatgagaagaagcttacacgtgtccaatcaggattgaacgatttaatcaagcttaaccgtatgtaaaccggattttagctgggtccacaagtagtcaaatatagattttttaatagtcaaataattttcataggggcgaagttcaagatgagttactacactcatcaaagctcacaaaaagagaagagaagagacgaggatcaatcaccattctcatggcttcagcttctttctctgcggtttcttcgctctcgtatcaattccgttcaaaagaagcgatcttttcatcgaaagcttcctgttttagctcgacggctttatcaggaaggagagtgtttggatctatcaaagcagctcaagtgacaagccatgagaatcctagaagacgaactcagaacgtcgaaggagatatatttgttggtaaataaagtctggttactttttattgcaaattgaaaacaaagagagatcattaacgccctctctctgtctatctttcaatggatttttttgcagacaatacttgtattgattgtgatacatgtcgttggatggttccggtaagcttttcttctctgaaatctgtaaagctcctaaatttttctgctctttcccctgtcttgtggacccttttggtggtcctttgaaattgatgaattgatttaagcattttgggtctattggttggtagggtaaagtagttggggggttttcattttgggtattgggaagttgatgccttaggattgatctcgaagaaggatatactaacattagaatataatctgatttgatcacagtcattatatgagaacaagaagttagaatgttcatgttatagttgtttgttagcaggccaatgcagctgtgagagcaggattttactttccctttacatttttttcagccaattcgtaaacagcttttctctgatttatcttcacaggatttattcactcgagtggacaacatgtctgcggttacaaagcaaccaacttgtaaggaggaaagactgaatgctcttcaggtgccttaactacgtcgattttagttttctttctatttaatatctgatgacatttcattgaggatgtttttgaatctccttgtttttttgtctttgatagcttttattgttaccttataaaacagatagacaaattttgtggaaatgtctgctaggatgtcatagactgagaaatttcttatgaagaaaaatattttagtgagtaaaatttctgaggttgtcctgattactcatggtttcttgattctttcaggccttactatcttgtccgacgggctctattcgcactcaaactccacctgctgacataggggaagctcaagagacctttccacttgtagtggacaaagacacacttcctgtactttttaatcccttaagctttcatttttttaggatggttattaacaagtcaactaactctgattagatcattgtaagcatacgtaggttttgaatagatttagatacaatgaccttaagttcttaactgatttagctccactgaggactcttactaccttgttcttatatgttgtctgctgtccttgaggtttataaagtttgagatttgcattatgctcagggcgtttttcattgtggatttcattccaagaaatcgtatggagcaacttcttacctgatccttcatcgtgagggaaatatacttgttgataggtatatacccttgggaggaggcatcatgaattcttattttctttgttgtttagtatcttatacattgttgatgcaatgtatttcttgatatacttcgttgtggctattaactctacacaactgattaaaccaaggttttgctgtttgctgcagtcctaggtacgtggagaaacttgctggaaagatcgagatgaagggtggtgttcgctacatgtttttgacacacaggtagaattgataacacctaaaggagaaaatccgtgttttctcttgtaatctctgttaatcaggataagcgatttcattgttcagggatgatgttgcagatcacaagaaatgggcagacagattcaagtctaccagaattctgcattctgatgatgtatgtccttgaatttttcacacctctctgcacattcttgataggttttttcaacatctagatttcgtgaaaaatgaaaaagcttgcttacatagttacaagaaccttgggctgcttatatgctctgtagaaaatagaaaaagattatgaggttggataaaagtaaaaagtaaactagccacgcaaacaattttgttactaaacccatctctgatcgaccattaagggaattttttttttgttaggttgaaccttcgacctctgatgtggagttaaagctggaaggaagtggaccatggagtatctatgaagatgtcgaacttatacacactcctggtcattcagaagtaagtttgtccaactgcaagaacatacataaaaacaaatgttcaatttttgttaaaaagaattccatcatgatcttgggataagagcttcgtacaatttgcagggatcagtgtgcatgttccataagtccctcaaggcattattcactggcgaccatgtaataatgaccgaatctggattgagcattttagagcagtacaatcacggttcaggtaaagactcatctgttgaatgtctttgggttaatgtttttgaatattcattcaagaacgtagaaagattgatctaaatgttttttttttgtgtctctggcagtgcctctccagctcgagaacgtagaaaaattgatcaacctggatttcaattggctaataccgggttagtgcactttggctatatatatctgctttactactgaaatggacattttggatgttgatggcggttttgtatatcaggacatggaagaagagtacatttcaaagatggagacgagaaggcgaagaatctggaagcacttgttcagaagcacagagagaaacaacttgtttcctttagcaaatccgggaaagcttaagatatgtatgctgattctaaaccggttaatcaaactaaaccagaccgaatgtctctacggcctgactggtctatgtgtcagttagttcccacgcgagtgatgtatttatttctacgtaacattgtgaacctgcttaaacgcttactagattgaaacgaagaccgtgagtaataaagtctcctctttcctagtgcaagtatgtcagctaaagtgttgctgtgtttttttacgatatttttcatgttattcggaatgtcttaaatcacaaaaaatattcgacttttcacaagcatcggatgcatagttgtttatttgataagggtatctcccatagctagttaaaaatgttatttaatatattcgttttggtaccatatgctacaataatcatattatgcagagatcatcgaataacatcacataaggtaagaaagttcatgtaaaaagaaaatgcactaataatcattcacaaacttagcagtagattagcgatcgaaaattgatgtcaccaaatttaacaatctttaaaatgacatcttttaattaacgacgttcattcggagacaaaatgaatttcatcaaaaatgagtcactaaactatttttcaaccactccactaaaaaagttaaacctcattcaaaaactgccacgaaacattcccaccaacaaaagataacaaataatatagactccctcgccttgttgcttcccactacaaaagtaacaagaaaaattgttacaatactaagcatagtattaacgttatgctatatatacaaatctctcgtcggaccaaatattcgcattcatagatttcattacaaattaacgaactattcacagaaagaaataaaacgagatgggaagtggcatgataaggacattggttattctagcaatagctttattcatgatcggttccgacaacgtccacgtggcaaaagcccaggtctgtggagctaacttgtcgggactgatgaacgaatgtcaacgctacgtcagcaacgccggaccaaattctcagccgccgtctcggtcttgttgtgctctaatccgtcccattgacgtaccttgtgcttgccgctacgtttcaagggatgttacgaactatattgatatggacaaagtggtttacgttgctcgttcttgcggcaagaagattccctccggttataaatgtggaagtaagtatctttcttgcttttcttattatagtttcgtaattgttaagcatataataatttggatttgaatctgttataggttacaccattccggcggcttaaaaaggaacgaaaccaacagaatttggatttgctataaaaattaataaaacgtattagtatctgaataatgatgatgatggatgttatcaggattttaggtcttgtagtataagcaaaatggggttgatggtcggaagatataattaatgaaaatatgtttgtgtttttttattttgaacacctaaagtaaacatctgaactagcaaaacgagcaattaaacatctgaccacataaataatccattttttatctctattttaacctcgtagttagataattaatttatgaccaaaaagaaagtaaataactaaaatgagaaaatgaaaaccacgagctcccaaatttcctgcggcttctttagcctcttgtttcgtttatgtaccactttctcgactccacactttataaaccaaatcctccacgaaactccaaacacattgtccaaagatcaatacacactgttttaagaagaatttgaaaagaaaaagaaaaaaagaagatgaatgccggaaagcaagcttcgtgggcggtggcgacggcgatcgcagccgtggaagtgctaaaagaccaaggcgttgctcggtggaactaccttttccgcttactccacaaagaagcaatggctcgcgtccgtaccattacagtcccatctcgtccctctcctcctacgtcttcatcttcggctacttccatcagatccaaacctttgtccaccacaccctttgagacatcctttgagaaagctatgggtcttagctgctttggtcccaccaccgttagattctagatctctatgtactgtgttgtatgtacgcaaatcagaatgtgcatgcgtctatgacttgtttttgtttacccatcacatcattagctaggtccactaaatgttgtacttgttggagtcattattctaacattttgttttcaatattgaaataaatctggttttatatagacataactaaaacaaaccggagtgtttaagccggtttatatttataccacaaagaatcttaatccgctaaatttacatcaccgaaggatggacccttgtgagtcacacaattggtgtgcaaattagaagaaaaacatcaattcattttttattacatggaaacaattttagaattttttttgctatgatacaatgttaccaacccatcattatttgatttatgataataaatttcattatgtaaattttacacatgacctagtgtataaaatagacatactagctggaccataatcagacgaacttaatatcggttaatacactaccggttcattaagcatttagacaaaaaaaaaaaagaagaagaagtccatatacatgcatatatacgaaagtcacatcagaagatcagacatacaagtacaacgactagtcagtggacgcagtttgttgtgtggtgggacaaggtgagaatatgcccacagatatcgctattgctctctttaaccattttggtccaaaacactttgccaacttttttaataaagactgatacaaattttagattgatacaacttaacattaaaaccacccaaataaaacttcgtaatatagataagcatcattgtaccacaaccacacaccaagccaataagtcaacaactactcctaacccttttaaacctaatcaatacaatttaatattagaccgactacgtgatggtgcatatgcttctttttaccaaaacatatatattcaagcaacaattaatacatatttcgattctcaatttaatcaactgaagaaatttcggtcacttgttttaatttttttttgtaaagcttataatttttattttgtaccaacatttaaaaatcaattattttggtgaaattaggatgatagataccgtcaacctacttttgttgaccaaacttgattctaaagaaagaaagcaaaagagagagaacaaaaacgaagacaactctcatcttcttttctctttctttttcctctttctccattgcttgttgattgatgatcttgaagcaaggatcatgaggttccttcacagatttctgttggaggatatgcccaaagaaaccttttcggactctctctgtaaaaataattgcatccaagagttgaaaactctaggatactgttcatcctattgtcttgacgagtgtccttccatctgcgagatcgtcgtaatttcaggtctttcaccacctgcagagatccacccgacgataacttaaagaggatcttgatcatctctgcttcatctatcatcacaactctgtttctccttactttacttgttctctgcttcaagttttactataggaggagaagatcaataacaacatcaagaagatggagtatggaagaagctaggaattgggattttgatggaccagcacctgttattgttgatcatccgatttggcatatcagaaccatagggttgaatccaacggttataagttccatcaaagtttgtcagtatagtaaaaaagatggtgttgtggaaggaactgattgctccgtttgtttaagcgaattcgaagaagaagagacgcttagattgttaccaaagtgtaaacatgcttttcatctttattgtattgatacttggcttagatcacacaccaattgtccgctttgtcgtgctcctatcgttgaggccaacacaatgattgatgatcatagtgaggggctagaggagataagtgtgatgattccagaagaaaatggagatgataccgatgaagaaatcgaggaagaaagagatggctttgttagtaatattagtagagatcatggtgagtcacaacaacagcgagtgagacgatcagtgtcgttggattcgttatcgggtttaagggtaagtgaagttgttgtgggtagagaaaaggagaagttgaagagaggcaataatattggatctgggaggtcaagtttattgaagagatctatctcttacagtggaaagtagtactagctagcttcagtgctaataataaaaacaagaagtccataaagtaagtaagtttcttgaagaagaaaatcaaatcaaacccaacaagatatagattgtattcatatgtatgaaggtgatataagattacgattatcaaagctagtcactcttgtaaagttaaaagagagttttgacaacttctactactctgcttagatactctggatttgtggattaagtataaatatacaccaaacttcgttttgtatgttacttatttattgttcctcaagaaataccatctggattttaattatttttagattcaactgtcttatgtgaatggatttacatttggcgttgtggatctctaacactaactatatgaaacgctgcgtttcattaaaagaaggtaaaaacgacaaagagaatcttcgtcttcatcgatcattgttgtgtaaaactcttgttcctcttcctcttcaacgtgaacacttctatttctcagagaacattcacctatatgtctttcttcaaggagaagtcttcctctttccagatttaggttagattcatgttataactttttctaagatttctgatttccgaatttgaattttgtttatgatttagtgtcggtgtagaactgaatgatactaatgcaaatgattgagatcgatttgatgtaaaattatcaccttctcgtgtaatttaaaggtcgaatcgtccggggtcacattgtcgcaggtttatgtttatcctctaaattagggtttcttttgtgaaattggggattttttttgtctgcttacaaatcatgctgttttatttctcttgaaattaacttcatgctgtttttgacatagaatacaacagacaaactagatttaacagaactgttaagatgaacggaacataagatgacttctaaaaatggataaattttaggtcaatttttctttccattttcagttttctgaccctaggtgagatttgttttggacttttcatgtattgtacatgtgagttaatcaaataaaatctaggttcatgcatttacaaacatagtttaggaagtaaaatcacatgttaagttttgatcttaaactcttgttgttattcttgttgttgtttgctacttgttagaattatgaatctttgacctatagcaaatttccataaaatcaatcatgttaacccttaatccaaatcctccatcaaagagtttttttgcattagttagcttctcatgaagcgaatttggttttgggaaaagaatttgtggggtggggtccaaaactgacacgacacaaaaactttggtttctccgtctttgttggagaaatgcattcacatccacttcttaccaaaattaaataaatcaatatttaatttttttaaggccttcttgttttttcagatgaacactcttcagatgccttgtgccttattgatccagattcgaagtacccaactttactctctagacctttttcatggcagccactcccacacacttctctgtctcccatgatcctttttcttccacgtctctccttaatctccaaactcaagcggtatgttgtcaattcttcttccccccctccctatcacactgtttcatctaattctgactattggttttcttaactctgttgcattttttatttcagatctttggtcccaatcacagtttaaagacaacccagttgagaattccagcttctttcaggtaatttcttggctttactaacttttcagtttggaattgggataacgatccgtaattatgatatagttgtgagagaatctatgataagaatcttagagaaatcacttggtgatgcattgtactttgttgaagaccctttttgtttgtacagcttatgtttttgtttcttaggtttctataagtagtgtgtcttttataagatttgaaaagaagagtcttttttgtgatgcttcaaatggcaaaatctcagtgaagatgtttttataataatcaaatgttcagatttagtatgtttttgtggtgtttgcagaagaaaagctacaaacttgcaagtgatggcttcaggaaagacacctggactgactcaggaagctaatggggttgcaattgatagacaaaacaacactgatgtatttgacgacatgaaacagcggttcctggccttcaagaagcttaagtacatgtaagttgcagagtaccaccaattgtcatttttcaatggttaatagattacttatttcctttcttcttcacctgatgatattctcttgagcagggatgactttgaacactacaaaaatctggcagatgctcaagctccaaaggtagctttactcttcaacgaaattttattgttcatggaaggcttgagatatcttctgtggtttgaattttgtctggagaaaggaattgttactaacagtttaagcaacagtttctggtgattgcttgtgcagactctagagtttgtccttctgctgtcctgggattccaaccgggtgacgcattcactgttcgtaacattgcaaatttagtacctccatatgaggtataacatttaatgcagactaccattttggttttatggcctggttcacattttgatatatttgcatttgcctgttgcgtgaagtctggacctactgaaaccaaagctgctctagagttctctgtgaatactcttaatgtaagcatctatcttatctcttatagtgtttcacgttttaaatagagcatttttcacagtttagactgttctgtttcttgaaattagctttctacagagtttgtcttttcacttaactcaaatctctaggcaacataaacagcatagacacaatgtgtagatacattcatttataattcttgtctcattgataaacttgtaggtggaaaacatcttagtcattggtcatagccggtgtggaggaattcaagctttaatgaaaatggaagacgaaggagattccaggtttttaccagttcttgattcaatctatcgaaaaaatccattaattgttgttgaactttgcccatattgcatttccctggtaacagaagtttcatacacaactgggtagttgtgggaaagaaggcaaaggaaagcacaaaagctgttgcttcaaacctccattttgatcatcagtgccaacattgtgaaaaggtgatgtcttttggcaaatcagcggtctcttatatgaatcagtgaacttatattcaatataaaacctgcaggcatcgataaatcattcattagaaaggctgcttgggtacccgtggatagaagagaaagtgcggcaaggttcactgtctctccatggtggatactataattttgttgattgtacgttcgagaaatggacagtggattatgcagcaagcagaggtaagaagaaggaaggcagtggaatcgctgttaaagaccggtcagtttggtcttgacttacgactatctcaatcttcatagagttttttttcataatttatagagaaacatcaaaccccttttggttgggattatcatgtgtttgttccacttgtgtgttgaagtcattttccttcttctgtcttattgaggcagggactaatgtttgttttatctttcagttgtttcgtttaaattccacatttgtgcaatgaactggttggtgtttctttaagatataatcattttgccactgtagtgagatcggaggcatgcattacagagataagaaaagtttaatacaccaacataattgaatgcaatttattagatttatgacttgcaatagtatagctatgttacaaattgtaaaaccgaataatgttacagtcaatactcatcaatcttacagccaccagtatatagttagttagcttatgttgatgataatcttcacatatgccattaagtttggaggagacaacttaagggatggaagttggagttccagggagagagggggagcagagagggccgtaacgggcgatccaggcattgcgggcttcggatattgagagaaaggagatgagaatgggaattttggaaaactttgccccggaaactgaggaaactcgggtgtaggattgctcggaaaaccgggtctagggaattgagggaaaggcatgggattagttggaaaaccgggtcttgggaactgaggaaaactgggtaatgctggattgttcggaaagccgggtctcggaaattgagggaaacgcggtctaaaatacttcggttttaacgtttgtttcttcgtaaattgttgtgcagcgcggcttgaagtgatcatagaggagaacatcagagccatgaggagagaagcgactaagaacattttagatgaggccatagtgtttaataaaagagctcttcaattagttgtagtgtgttttttatttgattacttatttctctgatggatttgagttatataggaggaaactcaatagagataacgagtacaatttgcatatcatttgactgaattttctttttatagatttacccctgatggtttcattattaagaataggaaacggttgatatggttaccattttgttgctattagttttgaatacatgtttgttgtatcaacaaaacaaatccataagacttagaactgaccctgcctcatcaaattgtcatatggttataatgtagattttacattgaatatcaactacatacatctaatattgaactattactgtggttgcactctgcaagctctttcatctctcttatgctaaacttacccaaaactcttcttgcccactcgccaaaataagtctcattgtatccaatcatagcgttcttgtagatggacatacaccgcctgtctgtatcggggaattgacatatttcgccaaccgggtcgtgccaagagccttcgtgtctcatccctgaccaattagctccccattggaacacaagctggccaactcctgcaagcttaagccatcctttggggaaaaactccattacactactatttttatccattagaaacaagttagtgagttgtgcaccgtgcggtgacactaacacatcggtcttcttcattagctccacttgctcacaaaatgatagattattcgaatatgaaacactaatttcacacccatctactctcttacactctttcttaaagacatcaatcaccattgattcatttctgaaagatctggctccggttctcaatagtaatgtcataccgattcgcggttttgatgccacagatgagctgatattacagtaattcctcgctttgcatctaatgagatcaaaagcttccattcttctctcccttgacattccaccttcattatgtctcataacaaccgccttctcgaaacaaacaggcttatcatcatcaacaaaccgtaaaaagtccggttcttgaccgtaagtggctgtgactatctcgctcagccaatgccccattccgaaccttagttctccccagtggtataaaacccatttttgaggcttttcacattgatttcttaagctccaagcaataaatggaactactgccgttagtccatgccacaagttaccataatcatattgattgtaagagacaaacgtcaagccatcctgaagaatggcattggtaggaagagcttcaggccaagccagcgcgtaggagttccatgacccatcatgttcatcaacccctttcaaacacaaaagccttcctttcgaagaatctgaaggaaattcttgatactgagcctcacctttggtttgattatcatagagagagctcatgaaccaagtatgaccttcaagtggtttgttcgaaaaacgatagtctttgagtggaaggaatgtcacggattcacgtagcttctccaccaaggaagccgtcttgttctctgatacttcttcatgattgtgtttcagatacgtcaagagtgcaggagggagtgaaagagaacgttgagtaatttgaaatgaacagatttggagaagaacaaaaacagtgacaacgaggcacaagacgttcaagtagaacttaagagaggataagcaagtaactagccttcgccaaacactagctttagttgtcattgtgaatcaaatagagtgaggcagaatctgtttagtttgatggaactaaatttgtgaggaacatatatggtcaacggttaatatagtcgtggaagatctggaagtaaccaacacgtgctctctccgtttttctctcttagttttacaatttttaatacgagaagtttttctcatctcaaagataagttcactactctgacttagattagatgcatacaattatctactcgaactatttatataatttaagccactggtctttgttatagttcctgtgctatgagtcattgatcatgtttgtcgaatttcgtgctagatctatagtagctgaaatagatataaagtactatataccgaataatttttggatcttgaactagaaatttaacattttttttttcttttcatattttacctttagcttttttttttcattaaagagcagttggctacatactctgttatttcaacaccaacatccatctagcgaaccataactgtgtttgcgtcctacaacatttgccatctttctttctttaaacttacccaaaacactttttgcccactcgccaaaataagtctcattgtatccgatcctaccgttcttatagacggacgacatacatcgcctatcagtatcgggaaactgacatatttccccatccgggtcatgccacgagccttcatgtctcattcctgaccacctagttccccattggtacacaagctgaccaactcctgcaagcttacgccatcctttagggagaaattccatcacgctactatttctgtccattagaaccaaattagtaagttgtgcaccgtgtggtgatactaacacatcggtcattctcatcagctccacttgctcacagaatgttagattatttgaataagaaactttcaattcacacccttctacatttttacactctctcttaaagatatcgatcacggctgactcattcttgaatgatcttggtccggttctcattagcaatgtcatacctattcgtgattttgatgtctcggacaagcttatgttacaatagtgtctggctttgcatctaatgagatcaagacttccattcttctctcccttgacattccaccttcattatgtctcataacaaccgccttctcaaagcaaaccggcctgttcttatcacgaaaccgtaaaaattctgtgttctgaccgtaagtcgctgtgattatctcgttcaaccaattccccatcttgaacctgagttctccccaatggtataaaacccatctttgaggattttcgcactggtgtcttaagctccaagcaacaaatgggaccatggcggacagtccatgccacatattaccgtaatcgtaatgattatacgagacaaatgtcaatccctcctggagactggcattgacaggaagagcttgaggccaagccagtgcataagtagttccatatgatccatcatgctcatcaacccctttcaagcacaaaagccttcctttcgaagattccgaaggaaattcttgatattgaacctcaccttttgtttggttatcgtagagagagctcataaaccaagtatgaccttcaagtggtttgtttgaaaaacgaaggtctttcaggggaaggaatgttaccgactcacgtagtttctccaccaagtaagccgtctcgttctcagattttatttgttcaggttcttgttgttgttcttttagatatgtgaatagtgaaggaggaagtaaaatgggttgttgggtaatgtgaaatgaccagatttgaagaagaacaaaaactgtgacgacaagacacaagacgttcaaggagaacttaggggaggctaagcaagtaactagattccttgaaacgctgcgtttagtcatgttttgaatgggaagagtgaatgaatgtgaagactgaagaaagagaatggtttttatcagatgacatgggtgaaatgaaactcgtgaggcaaaataaagctaactttatttgccaaagatgttgatgcattgcatgtttgaaaaacgaacgttatcacatctgcgccaacatttgtggcagtttttagcatcgactaacacatgcgtcttgttttattttctaaatttgttcagaaagtttttaagaaagaaatatgtatttattttgataaattgacaacccgaaattttcatataaacttaaagaatttagatagtgttttactgcaactttaactaaaaatcatgcacttataccaacttatacgtgtatatatcaaacgtcaccaatttttttatatattactatgagtaaagaaccaagtaagcactttaacaaaccacaaacaaatttaaaatacaacatattaataatcaaaaggaaattaaaggtacaaaatacaaatcatcaaacgggggtatgcgtaattaaacaaacaaaaacacaccacaatgaaacaactaattacaacaatcttataataaaatatacatcatcaatcacatgaagtgatgatagttcaaggactcgaagtagttgcagaaggcgggggagagaagaacggaatggatgggagactagtcggcagagagggaatggatgggagattagttggaagagaaggaatggatggaatattagtcggaagagaaggaattgttgttggaaatgaaggcaaagttggcattggaggcattgccgtgggaatggtgggaagatttggttgtggcaaagctgatggcattggaaatggagacattgcagtgggcattgtggggagagttggtaaagacggttgtggcaacgtcgatggcaatggaggtagtcccattgttggaataggcagatttgggatttgaggaagaggttgttgttggagaaggcggcgtgaggctgagcaagtgttgatcatcatagaggaagagaggcacactagaaaagcaatgcggaagagcttgtatgatgccattttgctttggttgtgaatctctaattatggttaagcctttctaattgcttctcttgtattgcttgctttgtgttgatgagaaattcaaagatatgcgattgagtttatatagcggcaagagtctctatggataacaaagaccttttattcaaatatcatatatggtttggttaggtgtactttatggttggcttgagctattgttagttcaacttaatgtgtgtttaatagattattttgacaattcaaggatttttattgaagttagttcaacaatcaaaactatctaactctaatacacatgttaagtctataaccaaacttttaaatgtcattttaagcttataaataccaattaccaccgtaagtatattataaaatctgatgtaacaacataaattttgtgtaaagctatgaaatatgaaataatctccaaaacaccaaataaaacaaacaaaaattatgatcattattttgtcacagctgtaccaaaaactccaaaatggaatttcccggtcaaaccggatacatggtttgccaaataaaaaaccggaaagacgaacaactaatggtttgacggatatgaccggtcgaaccggatagacaagcaattgaattttgaaaatctgtggtcattcccgaaaagtcaacctaactagacagaatcgaaattcaaaattccgtctctttggtacagaatacgctttggaccttctcgagcccgtcggaactgtaactcagtattattctggcgccgatgactctccggtcagttcaatcccgaagtaagcggaaaccgattgatgtatttgattactctgacgaggatgaccgtgttgaagaggagtcgaagaaactccttcgcaaattcgattccccagttactaaaaaacaccactgcgccatcgataagtatgaattccttcgatgctgtgagtgtttcttctctgaatttctcattgaattttgtttttggctgtgtcctgcaaaatatttgggaaggaagatcttatttctcattgaatttccccaagtttaacatggtaacacaagagaaggaatatgttattttttgtgttaatatctttctattgcagttgcgaaggatacccaaagcgagagtaaagtattgcaacacattgttattgatgttgaaggtaatagtaggaaaattatatcttggagaacagttctcaactacaaatgatgaaaattgtgtagaattccaaattttcagatgctagtgtgtgtggtagaatagaaataaccaattatggtttatgcagtcccagtaaaagaagaaccgtcaagatgtgaactcagcggagatggaaatgtgagcctttgtcatgcagtcatgatggagttattacaaggaatgagaatggctagaaattttctaatttttgttgtacaatatattgcagagtgacctgattgatgttatctccaatggctcccatagaaggattggaatcgattcattaacgtcatcatctctgtcggaaaatgatgaaggtttttagtattctctatctttagtttcagtaatcatttcctgtttgttatctcaaaattgcttgctctaaagaaactgctgaattcttttagtttcaactggagaagccacaaatcctgcttctgatccacatgaagttgtaagtcttttcgagtatatgctgttcttttaactagagatagttaaggatcacgaacaaaatgaaaagcataagctctacttcctctgaaaagttgttgatatgctgtttgtctcaaggcttatgcacttgggtttatatgcagacagtaactcatactctttttctttttctgcacatacaggatcccgagaatgcacaagttcttattatccctgatgttattatatatggagatatatactgtacaaactcgaagttaacattttcacgcaactgtatgaatgttgaaagttcttcagtaaatgcaactaaagggacctttagttgtcagtggacaatagaagatatcatcaaaattgagtctcagtggtgtttagaggtgagttctgtaagatcctcattttatgttgtatttttgaattgtatttttaatgatacttgagttgtattttttaggttgagactgcctttgttaacgtccttctgaagtccaggaagcctgaaggagttgatattgcgaaagatatttcaggtctaccataaagttcacttttgtttatgtttgtgtggcttaagtgcaaagggagttttcaagcgagggggttccttaaatcgttagctgaataagaagggcatacacatcataatccctctattgctagtttttgatgtttacaacgtcaagtctagtctaactaacatctgtactcatgctgacaggaattgatctcctaaaattttccgtgtatgaccctaaatggtctaaagaagtagaaaccatcagatcgttggactcgagatacaagaatatttggtttgacaccataacgtaagtcacttagaaatactattggcaccattgtgttggtatatacattgcagttctccccacttcctctccttccatcattattatgttggtggtatatgatataactggtcttttgctcaagtcttgaaatctatatgaatttcttttgtttccacatcgtttatagaattgatgacatagtggacaaaatatatatgtgctatcatataaaaaattctcttgctttcaactgtttccttgttacctaaatagatttcttggatgctgaacgaatcaacatatgaaaagcttttttccttaacaaggatcacttatgttttaaatcctgtaaagggttttgggagaaagaagttacgaagataggaaaactatctggtgggttataacttctaacttttaatttgtcgttgttgaatgttgacagagagagcgaggaaattgcttttagtggacatgatttgggaacttcactcaccaagtgagtatgaactataattatcttcgaataatgcggtttataattatgttctttggtaaatgtaatctgacagtttggggatgtactcttcttttatgttattttatgaccttatcttacctcttgatatgtgctgtttgtattccgatcttcagcctcgctgattcatttgaagatctagtttaccctcaaggagagccagatgctgtagtagttaggaagcaagacattgagcttctgaagccaagacgtttcatcaacgatacaatcattgatttttatatcaagtaagttactatctttccatattaacttaacattagaaggaaataaaaacagtatctgtagagcagagaatgcctacaagccaaaagcaaggcttgtcatattatatttgctttcatttatatttaccgtttccatgcataacctagttcgaagcagcttgtaaagttgggtttgatacttgcaggtaccttaagaatcgaatttcaccgaaggaacggggcagattccactttttcaattgtttctttttccggaagctggctaacttagacaaaggtacacctagcacgtgtggaggaagggaagcataccaacgtgtgcagaagtggactaagaatgtggatctttttgaaaaagattatatatttattcctataaactgcaggtgaaaatatatttcacacagatgctattttttcttaccgctattaagatgacttattcttgcatttgattgcagttttcactggagtctggttatcatctgtcatcccggtgaattggttccttctcatggtaagattaactcgttctgttattttcttatgcttgttgacttagttttacaacttataagtaaattttcactcttttgatgatgaagtcgaaaacccacaaagggttccctgcatcttgcatctggactcaattaaaggaagccacaaaggtggtcttataaacatttttccgaggtatgctctaacacgtttcattaaagttcactgccattacattttacttgttcttgacatttgggtttcaggagaccattttaagtcgtgatacttttgaattagtctcgagagttattactagttacttcagtgttggatgcacattatgcatatgaggttggatctatttttttgtttgtttgagatcaaagctggcttaggagtgtttgggtttccagttgatgattgattctttctataggaactctttgttaattttctaccggaactctttgttaattttctacccatttacatctttttattatttcgtttttccacttttccttagcatgcttagtcaaatatatggattttatcataactatttaaatgtccatcatgtggtcatagttacctacgtgaagagtggaaagcgaggcatgaaaacacaacaaatgattcctcaagagctccaaatatgcagtccatctcacttgaggtattgcttcctaacaaggatgaaatgatcttgatttttgaggtcagatagaaggcacatatcaaatcagttttggtcggtaggctattttcgaaaagcatgttactattctagtggagtcaactgatattaccattgtggattttgtgaatttctttagtgccttttctgatgctattgcctcatttcacaaattcagctcccgcagcaagagaattcttttgactgtggcctctttttgctccactatttggatctttttgtggctcaagctcctgctaaattcaatccatccctcatctcaagatcggcaaattttgtaagtagtcttgtttccatctcttgaatatgatgaagttgcatctgacatactgaatttactatgccatagtaagcagatcgttgttagtttactattttcttaaaattaaatgtgactattgaaacatgcatttgagaatactattttatctgtttcacaaatgatatttaagaaaattgaaacaaatttttataatcttatttacaacttaagttttcttatgatatgaaagcactccaccgagaaacagtgatttgaatgagatggtttaatttattttctgcttcttttcagctaactaggaattggtttcctgcaaaggaagcttcacttaagcgtagaaacatcttagaattgctttacaacctccacaaaggtcatgatccaagtattcttccagctaattccaaaagtgaaccacctcattgtggagtttccaacaggaatgatcaagaaactgaaagtgagaatgtgattgagtgctgtaactggataaaaccatttgatggttcctcatcaaccgttacagacatttcccaaacgaagacttgctcgccggatctgattcttagcaaagaagtttcttacagcggaggttatgaccctccgtcttctaagctccgaaaggtcttcatgtcacctattgtggtaaaatttcattttctatatcttcagtttagattctactgctaagtatcttatgttgataatgtttctatacaatttctcaaaccaggaagaagtgcaagaaagttgtgagaaaaaggaccatttggaaatggacatacagaaatccactggtcatgagatagaaacattgcgaaaagagggatgcatgctttatattgaggacagtgatgatgaagaagctgtttcagtagaatacgtctctgattctcaagattcatatgaagttgagatgaaagtagaagatgatgatgacgatgagcttatagttactggagaatcttcagggattcatggaagcagagaaatcaagtctgattcagcatcgatcgaaagagtgaacaaaagtagagattcaactgctgcctcttgttataatgactttcttcttgtgttatctgatgatgagaggagctcagacgacaaagaaaacatcttaataagttcaaatgtgatggccaagccaaaaacttgatactttaatgaagatgaatatcgccaatctaatgcgattattatttttatggttttctaatctctttgcccataatgaatatcatgtcaaattttatattcaatagtgctcgtctcttatacgaccagtatcaaagctttgtttttcaacagacaaaaaacaaaagaatctgctgttattatccaagtgggaggatgaaaaccgagagctcacacaatgctttaatacaaaaagaaactgatgtcgtcgtccattcacattcacacgtcttcgtctctactctgatgctccaggagcaattgttccaactcttccttgcgtcgggctatctcctgcaataagggtcaatgacttagaaaccatttgagtgatgataataatgatgcagatagactatcaattgacacttgcctcaagatccttgactgcttgttctcttgaaacttccttttgctgtcgagcacgcttcagaaagccgatgcagagaactccctgaagttcagacaacgatcaaagattgacagtgaaaacataaacgggaactcagatattgaaaaacaaaggaagtgattgcccaagaagctcatttttcaagttagaaatagccctacagattcgctaaccaccacatcaagcatctattgttcagagttgggagttatccaagtgatcctaaaggtctggggacaaagtgtcaacatgagttcttacaacaaaccaagaatcgttttcaagtgaaatgcattcttataagcaagatgcaaccacaaggcacaaactaatacgaaaagattcaacaataagcgagagcagagagggaataagcagatgtgatataataggatgaatggtgatagcgtacagaaatgacatagataacaccacaagcaagaagcaagtagcttgcgatgttctgtagaagcaggagatccttcttttgagtcatatagtcagggaaagctcttgtcatcacagcaacactgaaatgaacaaagtaaagatatatacataaaacataaaatcatacagcaaccaaggaatggtctcatttttgagtacctggcctggaattagctgaagcagcactcaaaaaacacatcataaaagaacaacacgatccattccaacacaagaggtacaaaagaaggttactaagctgtatagatgtacttacaaaatttgaagcattcctctaccagcccagtattcaagaacctgtaaacagatttgcaaaattagaatcaattcatgttagaaaatcaaaggaaagagatagcaaaagatacgaaaccttggaaaatttgagaatgaaaccccattcagtctcaacgagaacaacaaaacaagcaatcaccacagcataacaccggaatattccatcgaagagctgctcggagaggaaaagataaaagctttacacagagatcatcttcaagtaatctaatgcctgcgcagcgagagaggaaaaagagagagagagagagagagattatacatcgtggctgtcacggaaggagcgaacggcagcgagaacgttaacgacaacacagagaatggcgatgagagaggtaacgaggctgaagcatctacaaacaacaaggaaaggatctgctctgtttccgagcttcaatttcgcggatccggaagaaggtccggcgggggattcttcgatttcctcagtcctatccatctaaaaccaatttcccggtgagaaaatccgccgtcttaagtggaatttggaatcgagacgcgaaaaacgaaatggagaagcttgttggttaggattcagaagtggttagtgcggaaagctgaattctttctttcaccggacgttcaagccttgtcttttattcttcttctttcttctttgggaatatttaactctgcttactatttttatatatcagatcattaagtgttgtacaaaaaaacaaaaaaaacgtcattgttgatttgttgtaatgtttagaaatatgctatttttctagatatttttgcagtaatgctaacaggtatgcgatttctatcagttagtattcatgaccacatcatactgctctctctaaataattcagggctccacattacgattttttattataaaatctactagtacttataagaaagtagagttaatgaagtcgatgggaaccacttgggagagtggttacaacactccagtctagtcacatgtaacatgttcatggatacgacctagcttcctcttagtgaggttaaataatcctatagagcccattagaagtcaatgggctaacaaatatatgactggctctagctctagctctagctctagttctaaaaccaaaacccaagaccacaacaaacaatttttgccgtaacacactactaattttcactttcatctacaataatctccaaaattttgtattatgtagagatttgagtctgaatacgctaaaattttactcaaaaactggactataaattagaaattttggtctttttggattagcattccgttcgaattgatccgcataccaaaaataaaataaacgttgcggtttggttggttaataaacggacatgaccacataacacataagtcagtcacgagtcacatattccttttggtcaatcaaaagcccatatcatcatcatcgtccacacaacacaaaactatattcgatttcttccaccaccacacgctctcacatctctccggcgatgccttccttatccaccccgccgtcccaaaatctcgccttctcccctgccgcttctgccacgtcatccagactcactccctcctccaaaagatctttttaccctcatcgtctccccgatcccaccgctctctgtcgctgctcctcctcctccggcagcaattcttcctcttcctcttcctccgatgataaccctagatgggactctgcgattcaggatgttctcaagagcgccatcaaacgcttcgattcggttttgagctggtacgctactctggataacgatgatggtgagcaaggatcggagaatgtcgagaagattgatgatgattgggattgggaccgttggaagaagcatttcgatcaagttgatgaccaagaccgtcttctctccgtcttaaaggtttcctcttgatgattgtatctatcattgttgttaagagtcctgaagaaatgtttctaatgcggggattttgtattttggggtgtacagtcgcaattgaatcgagccattaaacgagaagactatgaagatgctgcgaggctaaaggtggcaattgcagctactgctactaatgatgctgttggcaaagtcatgtccactttttatgtaataactcgagttgtgattatagtttctaacaacactgtttgggatacttacttttgattctgaaagattccatttttgtatttgtcatagagagctcttctagaagagcgttacaaggatgcagtatacttgcgagacaaagctggtgctgggttggtgagctcattatttgtattttttctcgtttcttttataactgtggtttagcttcttattggtgttacattgttttctctatatggcttgcaggtagggtggtggtctggtatttcggaagatgtcaaagatccgtttggtcttattgttcaaattactgcagagcatggaagatatgtggcaagaagttataatcctcggtacttctgtcttctttactcatcgatttatctgtggcagtgtgggttttgtgtatcaaaacgccaaatttctcgaggtcctttgttgttttgaaagattgtgctatataacaatcctttctctctttcaggcaacttagtacatctgctgctggtgctcctctttttgaaatctttctgacacttgatgggaaagggaactacaaaaagcaggttttttcctccttaatcctacttagatagtgtccaatttgagtgattggggtattcattggagaattatgttccggtttattcgatgaaattgggagtttacttcattttggttctttataggaagctgacctttttgagtagatagcaaagtgtgatttctctacgttatctcaagaccaatgtgtctagaatatctaggtggagaatatatttcgatgttaaattgggatgtgtgtttcttcaggctgtgtacttaaaatggaaggagatttttccagacgtaccaactatgccctccagaactttgactcctggtaggtttttgacttcacctggaaggaaggaagatactggtaatcttgcagttgagagtagtgaagatgaagagagtgataactcagatgatgattctgatctccttgaggaatcttctggtttccagagtttcctgcgagatatgattcccggggtcaaggttaaggttatgaaagtaactgcgcctggaagggtggataaggatttcatctcaaaagttattgagcagatagctgatgaagaagatgaagagaacgatcttgatatagaagatatagatgtggaagatgacactaaggctgaaatcgatgaaaaaaatgctgacattgaattggaatctgtgacggatgaaatcattgacaacaacggaggaagggaaatcgcagtgaaatttgtgataggcgatattgttgatcgactttctggaaaccaacctcttaaagagtcacttcgatcccctgccaatctggaatctgtggagaattcttcgttttatcttcggttagagaaagatttaaacgttaaagagtctaagggtgtagaaggtactacactagttgatgggaaaggtagccgccagagtagacgtaggattgaaaacattatgggtgatttggccaaatcaattgagaaagagaagaagatttctgtcaaggtttgttttgctgtgtttattttcttcttgttttactgcagaaaaggagtcgcagcttaatctagaaattcacgttgcagatgcttaaggatgttggggagctattaagcctcactctcagccaggctcaaaaccgtcaacagctgtcgggtttgacaaaatttcgtcgcattgatgtgacaccatcactagatcccctagacggtgagtgagtaattgattgaatgtggaggttgttttgtttctctcgaaagaacatagaaattgacattgatggctcctaagctattgtaaatttatcagtattgatttctcagctgttagaagttaatttgttgggtatgacaagtgagtcgtctcgatagaatactttaaattttgtaacccttacctgaaatacaaattttctcacagtatgaattggattttaattatctttgtacttatctatccaggactttatattggcgcacatgggctatatacatcagaagtaatccatttaaaacgcaaatttggccagtggaaaggtggaaaggagtctaagaagccaacagatatcgaattttatgaatatgttgaagctgtgaaattaactggagatccgtatgtgcctgctgggaaggttagctttatgtttgttctagtatgaggtattaagacaaatatgaaaacttgttgttttcatggtcagtgtcaaaaatttgcgtactcaaacgactgtgttaccaatctagttaaaaaaaacgctgttacttttctgcctacacaggaaaggagtattatcatgcaatagtcacttggatctataaatgcacactcgcttattttcgatatctttcttcttccctaatactcttttgttgcaatatcatgatgagtgccttaccacagtcttatccatgacaggttgcatttcgggcaaagattggtagacgttatgagctcccacataaaggactcatccccgaagaatttggagtggtgtgcttaccttacaacactaattcaagtttatcattaagctcggttttcgtttagagttgttgtttgtgtcgcttcatagtagagttattcttacaaaatgcagattgccagatataaaggacaaggtaggcttgctgatcctggatttcgtaatccgagatgggtagatggcgagcttgttatcctcgatggcaaggttcctctcttcgtctctcaatatactaaaacaaacttgtccatggattcaaactcaaataaatgacatgttttgtgtgattgttgaattatggttttaatgcagtatgtaaaaggaggacctgtagttggattcgtctattgggcacctgaatatcactttgtgatgttcttcaaccgcctgaggcttcaagcctagttgtattctgctctacaatcgaggaagggttttcttctggctgtaaccattgtgtacgtatactcctagatacacagtagatatgaagtcggtactgagaaaggtataactgaaatggtttaattatatgcagattcatgagatcggttgtgcctaagataagattacttcaagttcaggtctttctggaccagtatagagatccacggtctcgctttttcttctggagcttggataaaggtacctaaattgggggaagatttaacacgccagagagtctttgatcagaaaggaaacttagattgtaaagcttgacaagtttatagatatatatatatatatatatatatatatatgtaaattaatgtatgtttctctgagattgctgctatattgggtagaaacgtggtaagagctgttgttgtatttcctttgtgtattttcagtttatatggcagaaaaagagaagaaatctttcttgttaatagtgactttgttactacatgcaacaacttaaaaatatagctcaagcaatgtgatcatgacaatagagaagcaaaggaatcattgatcttcaagtttatcatttcattacactcaatagtataaagattaaaagcagaaatgggaacttaggaggaggctgcagtagcagcagcagcttgcggtggcggtggtgttggtcggagagtgatctcaaccttatcgtgaacgccttgaagcaaaagttcaccttcaaatgcgactattttgcgtttcttggcagctctcagagtcccaaccaatgcttcaaagatgttggcacatcgatcgtcattgaacaacactccaaacgtcacctgtattcaaaaggaacaaatcaatcctcatgatcaagaatcaatcaactgtgtttgttagatctgagcgagagaaaagagtaaatgttacgatcttgattcttcagataagagtatttgttgattgaaaatgaaataatacagatttattccagatatagggagatccaacaagatttgaggagaaagagagagaccttgtaagagccatcggtctgacgagaaccaagacgatggatctcttcttccagtttctgaatctcttcgtctacgttcattctttcttcttccttagagatttcaggtctcaacagcctaatgttgtaaaaagattggattgaagaagagactctttctgtttctgacgaagacagctcgatggactcattcttgtccctcctaatccggttgaaaagaccaaaatgcgcacacttaaccggtttgaaaaccttatcgtaccgatttttcttcaacattgaaaattaacacacacctccggtttgagaccttaataaatgatacgacatcagccggtttaccacgattttaacattcgatttttctctattttttttttcttttagtttatccatacaaaaaattactgatgaaatagcaaaagattgcgtttaagttaacaacgaatatttaaagacagaacagaacttcagttcctcactaaaactgtatctatagattttttctaaacttatttgattaataaaagcacaggctaatattagaaagaaaaaaagtttttataaattaaaaactaatgtaattaggtaaatgaaaatgtttattcgcttcttttggaccatggagattaaggtgaaattatttagttgttatcattataaattaacaaaggttaagtgaatataaaattaatttgaattattttgttaagttgtgattaaagttcaatttcttcttcacgtttttaaaattcttgagcaagtaaaaattatttagcgactctaataaaaagatcctcctctcttcgatagagatagagctaagcacgaaaatcccgagtaattgaccttctcttcttcccagtgttgtcttctcttctccacgaacttaattttttcaaaaccctagcaactttgattcattcaaaatccgatccaacgatgactattgaagaagtttccggtgagactcctccgtctacgcctccttcttcttctacgccttctccgtcttcctccaccaccaacgccgcgccgttgggatcctctgtgattccgattgtaaacaagctacaagacatattcgctcagctcggaagccagtctacgatcgcgcttcctcaggttgttgttgttggaagccaaagcagtggcaagtctagcgtccttgaagcactcgtcggccgtgactttctccctcgtggtaatgatatctgcacgcgtcgtcctcttgttctccagctcctccagactaaaagccgcgctaatggcggatccgatgatgagtggggggagtttcgtcaccttcctgaaactcgtttctatgatttctctgagattcgtcgagaaattgaggttttttattcccttccttgctttatttgatactctattgctcttccaagtttgtattaatgtatgaaatgcaacatctttgtaggctgagacgaatagattagttggagagaacaaaggtgtagcagatacacagattcgtcttaaaatttcttcacctaatgtattgaacatcacgcttgtggatctgcctggtattaccaaggtgccagttggtgaccagccatccgacattgaagcacgtataagaacgatgatcttgtcttacatcaagcaagatacttgcttgatattggctgttacccctgctaataccgatctagcaaactctgatgcccttcaaattgctagcattgtagatcctgatggtaagttctactcacaagtccaatgactagtttaatgggttgtatttgacattactcatcttcaccctttcatctatctatactgtctccaggtcacagaacgataggtgtaatcacaaaggtgcatattcccagtccagacatttgttttatttcatcaccataggcgtccctgtctttcatgtgatttactatatgttattatcatgttttcagttggatattatggacaaaggtactgatgctcgaaaactccttcttggaaatgttgttcctcttcgacttggatacgtgggagttgtaaatcgttgccaggaggtaaacctgtggttgctcacaactattgctttttaatttatttagtgtggctcttcttttatgtgacttgagctttattgcttctgttctgtacttatttttcttatgattctcttgctatcatatagtaggctgtctcttcttttttttttttttttttattattctacctttggctgtgcttgttttttaattctaattttatcacttcgatgctattgtgacagaatttttattttttgtctactttttgtggcgtctgcatctacagtgttttgatctttatattttataaacaggatattttgctaaaccgcacagtcaaggaagcacttctcgcagaggagaagttcttccggagtcacccggtatgctaacatcattttgttgattcactttctgatactcttgctattttttctgattaaagctgagtctttttggtacctatacaggtttaccatggtcttgccgatcgtttgggtgttcctcagctagcaaagaagttaaatcaggtattttctgcagttatgggaattgggagttccttttttcgttatgtcaatcattgttcagtaaggcataagggagacgctttctctatgttgaaatatctaatatgggattatggtggagtttaaatgcattattcactttttaaggttacttacatggctgtgcggattctaccctagcttatttttttggccttgcatgtatatctttttttgtttacagactttaagatactttaatattagaaaatgtctgatagaagatggcctttctgttgcatttttttagatccttgttcaacatatcaaggtcttgcttccggatttgaagtcgcggataagtaatgctttggttgctacagcaaaagagcatcagagctatggtgaattaacagaatcaagggtatgtattttactgctcaatttgccatctatttatcgaattcattgttttgttattggctttggtacattgccatttgttccatttaatggtgtgatttgctcagtcttttcatttgaatacaattttgctcgtccagactattttctcatgtatgtgctcagggttcgtaaagcctttttgtttttagactacaaaaaaaatatctttaagtcgtagaattagcatttaaaggtgttcttatttgtagggaaaggttgttggccaatgggtacttcttttttaacttttttttgcttcatctctatgagttgtttttctttttcaatttttaactagtcaaacttatcttattctattggtctttactgtccttgaaattcttaggctgggcaaggagctcttctcctcaactttctctccaaatactgtgaaggtaatatgtgaagacgatatttcagttgagaccattgacatttgttttatgttttctatggttcatagtgagtctcatgggtaaatttttttgaacagcatactcttcattgctggaagggaaaagtgaagaaatgtctacgtcagagctctctggaggagcaagaattcactatattttccagtcaatctttgttaagagtttggaggttcgtttgggcaatcgttaaacttttttccttgagcttgaacagttgttatacattcccgtttcttaacctcgccaatacttttgcgtactttcggatggtacactgatgtttacggttcatttcattgacattgatagagaacttttacactgctttgttaagcattggctcctctatcttatcttagtttagctagtgacattatccaaatggaaataatgtagtatatttctgacgttgagctcgtggatctctgtaaatttagactgattgaattccttcacattgcctcttcaggaggttgatccatgcgaggacttgacagatgatgatattcggactgcaattcagaatgcaactggtccaagatctgcattatttgttccagatgtaggtttcttaacatgtttcagcatatatggaagttatcctggttgtcagggctttcaagcattcatatgtttccttgccttttccacttcccaggatatctaattagagtcccttgatctcgttcaattatgcataggttccatttgaagttcttgttaggaggcagatatctcgtttgttagatcctagccttcagtgtgcccggttcatttttgaagagctaataaaggtgagtgtttttttggtttgttgttaataagtaataagattacttcataaatttgaatttctctacagattagccatagatgtatgatgaatgagttacaacgatttccagtcctacgaaagcgcatggatgaggttatcggggatttcctgcgagaaggtcttgaaccctcagaagcaatgatcggggatatcattgatatggaggtctgtataatgaattgaaaatcctacgttgagttgagtttctctattgtgtataaagagcccagactaatatgttggttgattagggaccttttttaatcttgagcagtgatttcctcgtttttgattgattagtttctttgaactaaagtattagtgatggtatcataatttcttgaatgtcgtttgcagatggattacataaacacttcacatccaaattttattggtggaaccaaggccgtggaagctgcaatgcatcaagtgaagtcttcgaggattccccatcctgtggcacgaccaaaggtatgaagtactctgagcaaatacattaaaattggttttggtttcatatatactctgcagtgtttcttatacatttaagttgatatagcaggacactgtggagcctgatagaacatcttcttccacgagtcaagtgaaatctagatcgtttctcggcaggcaagctaatggaattgttactgatcaggtattgtcattttacatgttatatataattaattctgtatatcattgtgcactatgggtttagccctaaggacccatgagcaaattagacattttcaagataaagagtgactatttgacacttaactcatgattgttcatagggagttgtatctgcagatgctgaaaaagctcaacctgctggtaattttctcaccgctgtcatttttagccttccatttcgtgttttggaagatttttggctgtgtgatgaatctcttgctatgtttcagagactgcgtaaacatgtatcttgtctcgattcgctaatagcttataatcctgagtagattttaattgtggttttgctgacacatgatagcaaatgcgagtgatacaaggtggggtatcccttcaattttccgagggggtgatactagagcagttactaaagatagcttattaaacaaaccattcagtgaagctgttgaggatatgtctcacaacttatccatgatctatctaaaggaggtgtgtctcctgtgccatcttagatgattcatattgccaatacatgcttacctatttgactcatactgtttgctttgcttttctgaagcccccagctgtcttgaggccaaccgaaacccattcagaacaggaagcagttgagattcagataacaaagctgttactaagatcatactatgacattgtaaggaagaatattgaggactcggtaccaaaagcaatcatgcatttcctggcaagtaccctcatccctttccccaagtttcttgcagtatctcaaacttgtacgatatatcatcaccttgatatttgattgccctttgaaattgtcttttgagagagttaaaatgaaaagccgtttgtccatcttgtgtgtaataatcttgttgctatcttacagtaaataaactctgaagaatgaagatgctgataccatttcttttctttttaatgcttcaggtaaaccacacaaaacgtgagctgcataacgtcttcatcaagaagctttacaggtgatgcctgtgttttttaattcctcacatctgtgtttggattagtagtctcttaaaactgactagtagtttcatctggtgcagggagaacttgtttgaagaaatgttgcaagagccagatgagatagcagttaagaggaaacgcacacaagagactctccacgttcttcagcaagcttacagggtatgttctcagcaaaacctaactctgtacatcaatcgtcataaaccttgttccgttgaacaataaagtcttcttttcacttaaaactgtttctatgaagaatttatgtttgatattcatgtaaccatgtggtctttgtgggtgaaacagacactagatgagttgccactggaagcagattcggtgtcagcaggaatgtcaaaacatcaggagttactgacatcttcaaagtattcgacaagcagctcatactcggcatctccaagtacgacaagaagatcgagaagagcaggagatcaacaccaaaatggatacggattctaacatgatccaaatatctcgaatatctctcgactgtgataacgcatttcattcatttaatggctctttcaggttttggtattaaattatgtgttggtcatatgaagaatttatataggaaaccagtacacagtgtgggttttggtccttttggactctgcattggttgacttgataagggagtgaaaggtgatatagtttttttttccaatttgtttcaaatgctccccctgcaacaataacgggaagcaaacacctttcactctaaatttttttttggggaatgtttaatcaataagttatattacatgatcggtccacacgaccttataaattgtgtagtttcttcgttttttgagcaacgagacgtggaacattcccctatacgagtcacagattatgctggaaattgacgatatggttaagagttagttatggacagcggtattcacaaattccaaacccacctcagtactttctgtatagatgcggaccaaaatccgatttgttgtctagtccctatcactggctaagagccaagacacgataatgtttactcttcggttaagaagtggacacgtcattctccattttttccgtattcggataaaatgcatatctacctactgccacgtatctgtatccaacatttctatcacacgcattttcattttcagcataatctataactactaatcagaaatcagaataaattctcttattacttgatgagctgcagaaatttgtgatacatatataaaaggcaagactaaaacctaattaaagcgacaagaaaagaaagtagtagtcacatgatatcacaacaattattgtataaacctcataagcataatgaaattaacagacatactttttcctgaaaacttaatcaaagcatataatggtcgggtcacagcaacattcatccaccaagcagcaacaacacagagctgctaatctgcaaaccaaaaacacacattaccaccgacaaacattgaagttcatttataaattccaacagatcactccttaataatagaaacaaactaatattatgaaacataaaaacagagcacttacagtccttcaagaaaaccaacttttcgtggtggtggtggaggaggaggcggtggcggtggtggaggataatactgtggcggtactcccaccggcggtggcggaccttgcgggtaatttcccggtgccgggtaaggatatgcatacttgggatcgctcatattttggggagaagtatacaagaaaaaaaaaactcaaaactaaagtttttgaatagaaatgttgtcaaagctttggaagcaggggaaataattgttgagagagatagaacacggatttgcaatctttagagcgcaagtgttgtcctagtcgacgtgtatttatatttgccaaagaacacagcttcaagataattcttagattaaaattaaaaaaaaaaattctctgtttcagtaagaattttatggagttttgagaataatcttcaaagtacattggaaacgcaaaacacttaaaaagtgttgacaaaagtataggaatctgcttcggtagaagattcgagagaggagaggaagcatcggtggttttggagttccttattcttctcttctttccaaagttttgtcattcgccaagattccttaaaaacttgttcacacatcataattatgcaccaataggttataaatcataatccaacaagttagtcattggctttaattttaaaaaatcccataagagtaaaatcttttagaaagttaatcaacccacacatgggctagaaaaccaaaaaccccacgaacattgagattacaagaaacatttttaagtcctaaatgagcccaagagcattgcttaatgaagaagaactgatattaattaactaatattaggacacataaaaaaatacgaaaacaccaatcttcatgccacaaaatcaaacaaaaacgaaaaaatcaattttcatgaaatggataaagagagagcgtaattatcaggaatttgattgagtacggttgttatgatgatcattcacaattatctttgatcttgagatttagcaatagttaattttcggatgtttttttgttacttgctgctcacttcttgtatgcagattaatttataagagagaccagttacaactctttcttatttgaataagattttataagatgtagtgtggccatgtgggtttattgcatgcagctctctgcgttggtcccaagtccacgacaatagagagtttctgcacttcacggtatcgtcgtcgtcacaagttctttaccttatcattggcacaagttagccaccgtctttgcgcaagttagcatgttgtgctacatacgtgtcatgaactgattggtcaaatttggatatattttattcccgtcggttatgtttggataaaaatataaaacggaaatttctgtttcagccttccttggtcccaaagaaaaatacgcacacctactcccttcattctctatcctctccactcataatatatacatctaaatgcaatctctccaatttgcacccaatttcttcgaatcaacttatcaatggcctcatcagctgcgatgttcatgctccctcttcctctaactcagcagataacaacaaacaatactctgcagactacagccacaccggaaccgtcagcctccatagttaaatgcctttttccggcgagaaactcatcggaaagttctgctcgttcgaagtttagtctttggctatttggcaatcccgctacgtatgacaagaggttccaagaagctattgaacttagttgcttgtgatggagatttggagatttttcctagtctttttcttgtgttttttaaatggacatattgtaatttcttcccaagtctcaccctccgctgtaatttatctaataatcaattcgatcaaagatgttccgactgattttgatatctaagaaactttattaatcataccaaccaaacttacactcttattaacacaatgacacaacaacgaatgcataagcattacaagaagcaagacaagagtttaccagaaacacaaagagcttcttttagttctgatggattccacttggccatgtcagattctttacaggctcgagaatagcttcaacctcagacagagtttcttgatccatccccagactttcaagctctgtaactgctgcaacattttcttctacctgtttcagaaacacacaaattctttcatatttaactccaacttcccacataatttgggacttgacaaggaaataccaagcttgaatacctgtgagacagagctcatcccaaccaacaccgacgaaatctccttgtttgctaaactgtattgcagagctaactttgtgatcttcttgccctttgatttgcagtgagcaactgcggctttgcttgcagactacataagacaataaaagcagcaacgggttatgactttcatatttgagaacaatttgttaagaagtcagtatcttcgtttacttctcactaaatcaaaatatcaaacagagaacaaaccaaaactaactcaagagcatcccctactcttccaaacatcaattcaactaaataccagcgtccatgtgaatctgtttaattttctactgaatactcatcaaagaccaactaacatgttaatacccattgggaactatctgaagtgtctctaatcttgcctatgaagactaatcacaatgattgtacgagttaagaaacaaagattgtcagtctcagaagtatagcatctatagaatttaacctgcctatgctcgagagaatgctgcacgaatggcgttttaacactagtctcttatacggtgtatcaatacaagtgctacagaaatgttaacaagaatcacattcttttgtaaaatgccaaaccttgagctcaggggaagcagggtgccattcaggaggaccttgttctgtaaggaggcccattgctaatggagaagcacttatcacacccacacctttgctcttcaagtaaggtagtaaatccagcaacgtcgaatcattaacgccgtaatgacagtatgacaatatcacatcgacagtccctggaggcactcgatcaagaacataagtgaaaatatctaacggaagaccagtgataccaatgaaccgggtcttcccctcttgtttcagtttctgaagagcaggaattgtttcactcacaatctggcagcaatgaatgaacacttagtaaaggtttgagacacaaacaacgaaagtgataaacccaagagaaataaagtggtaaacctgatcaagagacccgaactcaatgtcatggcaatgaagtatgtcaacataatcaagctgaagcctctccaagctctcgtcaatactctttcttactctctcagcactgaaatcaaaaccttctttatatctaccacacttagtagccacaatgtagtcacttctagggacttgcaaagcctttagtcccttaccaagcattttctcagacagtgttcctccataataccttcacacacacaataaatgccaaataaaaaagtaaatatgaaaccttccaataaaaattttgactttaacgattaaattagtctcaacattcagagaatcagcaattagtattgaagaatcagtaatctttagaaaatataaaagaagaagaagtgcttacggggaggtgtcgaagaagttgataccgagacggaaagcctcgcgcacggtggcgacggcatcatcttcggcgactggaccgaagacacttccgagcggagaggcaccaaaaccaacggcgctaaccttaagccctgtgttccccaaagctcgaagctctattttcgtcattgttgataggatcaacaaaaaaactggttctcgttgatgagagacgcgagaagacaacacttgtgttgtgtttttggatatttttgcccacacggtggctcaacaagcctaaattacgaaaacacccatcccggtccaattttagatttatttaaccaatccaattttatatttttttgacgttcttcctcagtccaatttaaatattttattttccacactagttcacttatttgcactttgatttcgttgttaaaatactttgccaaattgcttgaaacactggtgtcaaaagtgtcttctacaaattccagaaaacaatggaaacgacattattttaactcaaatcatgtcattaaagagggtgatgatgatgaggaacgattacaaacaaggttcttcatttgtaaagctgcttgaatcttcgacatgcctctaagatgttctctctgtgaccaaaggcactgacacgaacgaacccttcaccccctggtccaaacccacttcctggagttgtaaccacatgagtcttctccagaatctcagcaaacacatcccatgagctttggttcgggaagtgaacccatacgtaaggcgcattctttcctccatatacatcatacccgagagatgtgaatgtgtcaatgattatgtttgtgttttctttatagaatccaatcaccttatgcattgcctgcaatgattcaaaagacaacaaaataaatcattttgcatatctgaactagtgggaactggtttgagatctctctttagctaagctaacctcaagtccttcgggtgtaaggcaagcaagagcaccagcttgagagatattagatgcaccattgaaacaagtgcagataatccgattgaagtctttggcaacagggaaaccgtctgaatagagtagctttttcgggatgacagtccaaccaagtcgaactccagtgaaaccagcatatttgctgaacgaagctgtctccatagcgacctgtaagcggttgtacacatgaagaaagatgttgaaaaatggaccttttaatgttataatcaatcagtctattacctcctctgctccagggatttcgaagatggatcgtgggttatcatcagacatgtacattgcataggcggaatcatacactattatagaaccgttcttctttgcaaactcaactaactgcgttagttgctctctcgtggcagcagcacccgtagggttatttggggaacagaagaaaattatatctgtcctgccaacggtggacaagtcgggaaagaagccattctctggagtgcatctcatgtactcgatgtttccatacttttgcacatcagtgttaaattgcccagtctgacccataataacactggagtccacataagcctgtataatccaaaaaaaacgagacagcatagttccacgttaaaatggagcaaaagtagagaagactacaactgcaatttggtttctatatgcccaattaccggatatgaaggatcctgaacagcaattgtaacattggaaccaaacataacctgcaagaagtggaatcaagaaacagctgttcatatttcttaatcttgtatcaattacagatgaatagtcagcaataaaacaaacctggagacgtgagatatcacatttagctccatcagaaacaaaaacgtcatcatcccctatgccaaggccaccgtagaatgttttcgcaatagcagctctcagtggcttttcacatatgtgaaatcaaggttagtttggataaaaacttaacagattaagctttaagattttacatgtaagaaacaggtttaaatccatcttctcttgaatttagcagcagttcaagactatccataataaaattgaagtgacgtgcaaaggcagataataaagaaatgataacaacgcaataaggtggaaatgaagggtgcactgacctttgcaccttgttcagcaccataaccactatatccctctattgttgacaactcatgagctttctgtcagagaaaaaaaacatgattaatctctagagattacatgcctgtgtgaatagtatagcaaacaaaaaaactatgctaccagaataattttcattgttagattacagagaagttctcgtttaataatccaaatacgccaaaacagaaaatatgttatacatttttgtcaaaatgaacgaaataatacatgttagggcagtgttagtaaaatcagtttaaaatatgctagagcccagagaagggcaaagagcacatgaagctaagttaagataaggaggtacctttgccatagcagaagtgatcacttcaggaattggctcagttgtgtcgcctattccaagacttataacttgtgcatctggatatttcaacaagtgtgcagaccttcttcttgcaatctgtttgcatccacacaaaaaaataagagagaggagcattatatacagaatcaatgaggatatattaacttattacacagatagttataatatttcagatcactagaagctttcaaaaatgttaacttgaaatgccactcctttaggtatttgaaatcttaaatagtagtaccaagagagtaacaggtaacaaacctccgggaataggtatccagcctgaagtttggacatgtttgaattccgtgacactttggtcttatactctacatacagaaaacaaaatcatgtattgtaagaaacagataaacagctaaaagacgataaatcattaactatgttactaatcattacagcaaaaacaacatggagtaggaacattaccgatcttctcttgcggcgtagcaacacatttgcaagtattgacccgttttgccatgggtaagcaagcatttcgagttctgaagccaaaaaggaaagcaaaccaataaaaaaatgaatcaatgatcatcacaagcaaatgcactgttctctggccaaacaacaccatccaacatcgacttaaaaaccaaaggattgaaatttccaagtaaattcataacatacaattaatttctggaaatgaatccaatttcatattcatcctcactagattatatcagtagcaaacagagagtaaaagaaaacaaaacgacgcacctgagattaaaatttgaaggggctaagaaagtggatgaggaagaagagatcatcgaagaaactaactgatgggtcgacgacatttttcctgcttcgcacaaagattttttcagacaaatttgcagagcaaatgaaccatgggagatagttggtgagactgataaaactagggttcttcttcggtttggtctgagaggaaattaatccggtttgttccggttcggttttactagaaatttttgggaattttccaattcagttcaatttatttatttctctctctggctcggacaatgattttgctctgcgcctgctggaaaacgccgaggaatcgcacgatttcgtgaagctgctactagatatctgtatctgagtcaattcgatttcgtggtaattaatctcgaccaatagggttctccaaaaatccccttttcgattgttgtgtgtttacgtaattttgtttgttttgcttcgttgatttcgttgtcgaaagaacgtagctttagtggaagttctgtgattaagaagcaatgatttagatagctgtagtggtcgaattaagttcaactccatctttgtttgatctacccagattgatttgatcacataacttgattaggcttatacttttttgttttaccttggagtagatggatctggaaactgaaaatcgaatagcttccattcttttaagagaagcagcagaattgaggagacaagctgagaaagatggcgtcagagcatatcttgagaagcctaatgtaaggcatcgacctaactctagatttctcactgctacagttcttggtgttcagcaaggtataatcttttgttgacagactttgcttctatccaacaaaatctagtttttttttagtttatctcttatttgtttcttctttattccattcagcaaacaaagctgtggaaaccaatgagatgtggagtcttcggagtaaagagattgagtttggtgaaaggctcaaaagaaaatcaagagatgagagcagcaatggtcaaagtgagcagaacaataggagggattttttaaagagatgtacttcagttgatgagaatgttactactactagtttatcaccatcatcaagccggagcagaagcaaaagatggcaatcagaggatgatgatgatgaaggcttaggagatgtcgaggttaagacttttctccaatcaaggtatttccattatactcagatgctgcctgattatttcctttacaataatgatcgaatttgggatcggcttttgctgataaaacttgtgattctggtctatgatagggtcaagcgtggcagaggttctgttggtgctatgatggatgaaccgctaccctgtcttcctgagagggaattgtcaagaacttctgatacaggagatcggaagctagtgattcagccagagcgatcacctttattgagacgtaggacagattcttcttcttccgacgaggaggaagtttacaaacgggctcatagaaagagaaaggagcataagaagaaacttagtaagaaacacaagtcaaaagagaagaaaagggataggaagaagagaaaatatggtagggactagatctttccggacaaaagtaattgcctttttacaccggcagtgatgttgtatccataagatgatcatatttcattaattcttgtattagtaaaatgcgaataaaaactctttgaagtaaggtagagagtgacatatcttagagactaatgatatataggtagtagagacaactattggtgtggcctatgagggttcagatttggtaaaactctttgaagaaaggagagagcgacatatcttagagaccaatgatatatatatagagagaaaacatcttgaaaccatagaaaaagttgttgttcatgcctacattgatacacattcgccggacaagtgacagtttgaaagttgaaaacaaagactaaagttttcgacattcataaccagttcagtggtcatgcactctgtgttaggagtcttcaaaatggtgatcagtttcgtcaaagatctcctcctgcaaccacaagccaagcaataattaatccgtgaaaaagaatttttgtttttaacttatataagattccttacctgcagaagttcttcaatgacatcctccatcgtaatgattccgactgcttcttcttcctcagcaagtttaggcagcggattgccattcaattgcaggatgtctgcatcattgtcttttgaccacttcttgctctttgaccctcctttaaacgaacttgctcgattcggaaagctcttccacttttgaagcgatctttttgtccttaacattctctcctgaggagtaggagttccctcactatccacatccactcgggcttccttaacactccctattagaaaccaaagcaaagattctcaatacttgtaactcagcaagacattgttttgtcgattaatgaagcagtttaccatttttagaaggtaatgggtggattttgtcacactgtcttacaacaacagccatgtggctgagtcctttctggaattcgttcaatatgtcatataaaggcaagatttctggaactctaaaacaaagcaagaaatcagcttttgaagcacattcagtggggcttagttacttagatttggaagtttcaccttggaatccttcttatcgtgacattcttgacaggtatttcttcatctgggttgatagttaataagttcttcacctgaagataatagatatgaatggttagaagtggaaccataacactaaagaggaaaatatttgtgaaaaatgacttcacagagaagcgagtcaaattgtggaagtaatgcatgagactgggagttaccagaacaaggccgattatgttagttggctgctcatagtatactggaactctgctatgccctttctcaagaatcaagttcatcaagtctctataccagaggaacaaagaaaagaaaagtgtttagcatgagaagtataaagactccaggcaagtgtgtttctgataagttaggtctccaaggaatcacaacacaaaacctgtctagtttggcattgatatcaatcacaaagatatccgatattggtgtcattgcatctttgaccattttctcagagagttcaagagctcctgcaatgattgtcgtttcgtcatgagtcaactccccaccctttccagcctgaaagaaacaatacactaaacatcatgacatagatagaaggggtacataaacttttcaatatggaagatgggatcaatgcatacctcatttccatgaaaatccacaagtgttttcagctcagctcttcgaaaaagcgctgcacgacgatgacccaatagaaagtccagcaactggattattcaaaggagcaaaaatttattataacaacgagcatgattggtgggggcactggctcctacggaaatcggtaaagtgtttttaccttgcttattggccatgcaacaggtaagcagataaagactaggacacggacaaacggagccactgttgcaccaatcgctaaaccataacgtgaacaaatcgactgaggtataatctgcagttgcagtaaagccaaccatcaatgttagtatcctgatttgcatgcattcacatctgatatacaggaaagtgactcaaaatgctcatagtcgtttcccttattgaatattacaggaaatgctaatcttacctcaccaaagagaagaatcaatgtaactgaaatcaaaatggcaccccatgccgtcacaaggccatcaagaaaaataggaagcgtctgaaaagataaatcatcactatcatcaaacaccattcctgaaacctataaataatcacagaggctaagattcagttttgtaattacctccatagcagctgcattgcatataagtaaagtgacaagcaacaagtgctgattctttaccactggcaatatctttgctgcagcaaacaaaaacaactctgatcatcattaacagagagacagagcctaaaaagacatgaattagatcaaagcaggctgctcacaacaactgaatcatcgatgacataacagctattatgtcattaaacttggaggctctggcttagatagcaaaaaatgataaaagggtaatctagtcttgattagtaaagttgtgataagaccaaaatcttcaccagtataaactaacacgcagcaattgaatattacagaaaccaaactcgacctaatttgaacaaatgctttagaaagttaatcaaaacggccaatagatgaactaactgataaccaaattcgaatatgaacatcacaaacaaaaaaagaccatcgcaacatctaaccacacacgtgtaggccaatcaaaaactgtcaatttagtgaaataacaaaactttactaagcaaaattgtcaattggtgaaaaataacaaaactttaatagaatcagcgacaaaagattatacctgcatatttacgatgttcaggtgtaccggatttagcgagaacttcaagatcaacgagactcaaagacataagacccaatgttaagccagacatgagtccagcgaacaagacaagaaacacaatcacagctatatgtataaagaagtttgggctgcaacatacatactccaccgccattcaaaatcgactctttaagagaaaacaacaatccccaagagctcaaaaatcggaaaacacactaaaccctagctcactcgcagagttgacatcttctccttctccaaaactttcttcagaatcaggaaatgaacagtctccgactcaattagtaacgactaagatcggaaaaccaagcacgaagagagttaaagtgaagcccagaaaatatctgattaaaaaaagcactttttgtgttgtgtctttgcagagaaatcgaagcaattatggagagatgataaaacaaacaacagagtctcgtgcggtggagatccactgccatatatagaacgtggcaattagatattataatgacaataatacccctgtagtgagggctacgtacgtgagatgacaaaaggtgttttcgtaaatttgacggtcgtgtcctttttttaatggtgacgcagcaactagctgggttttcccgctatgacgaggattttgatccgatacggattctcgccacaacacttttttatgtgtcttcaaactcaaagtgttttttgtatctttttattaaaattaattttgtaaaaaaaaatcgtaaattggacttgatcaattaccattttcttttttgaatgattggctagtgtagttttgaaattcttattattatcaaaaagctacgttaccaaatttctttttccatatattatgaagaagagaagctttccttatgaactactactttttgggtcggcaaaattctttttagcaaaaagcatattcgagttctcatataatatttcattggattgtaggttatcgagcaagatcatctttatccgttcacaattgataatctggtgatcgaatacctacgagatcgccgttaattagtaaaagtcataagaattagattagtataaaacatagaaattatttcgagttgtcgggatataattagtgttgtatctatggtgttagtaaaaaggcaattgcctaagccaccaattttttttaatttttaggcctcaaattttattttttaatgactattaggccacattattttgttaagaaaatcattccgccccaatgtatttgagagcttcaagaaaatcattgcatcccaaattatttcgtatttatattttttttgaagactctaagaattatttgccgtgggtcaaactcttatttagttttaacgaattttgatacataaaaactaatgaatgtatttaatattttttaacattaaatttaaatatatattttttattagttgaattagttataattaataatattttataatataaaaaagatacattaaatgagataagaacgagttttcacaataaaatgcattatttaattagcatcatcgccatacattcacgtgatctactaaatatcatagaaattaaactagcataaaactgagaaattatctagaggataaaaataactttgaacggtagtatattctaatgatttgtacatttttgtgcttcaaagtttctccttaataataataaaataaaagcataccaacgtatatagaaagatatgaagaaattgtcttggatttttaatacagtaaaaatcatttcagtcaaatccttgttttaaatttatttacaaaggggcattatcaaggctctctgaccctttcgccttattgacttggtaaaacagttgataataataatacaattacttacaagtcgtgtcttcgttggtaaaaaatatctcgcaagtgttattaatcgtccataaaataactccaacctaaactctatataaatcctcgtttctaagttctaaccaataacacacaacatagaataaaagagcttacagacaactaagaaaaaaaataaaaatgaagatgtttatctctcctcaaaccctagtactattggcattagctcttgtcctagcttttgcagttccactgaaagcccaagaccggcgacaagactaccttgatgtacacaaccatgctcgagacgacgttagtgtgcctcatataaaatggcatgcgggagcagcccgatacgcctggaactatgctcaaagaagaaagcgggactgtcgtctcattcactcaaactcacgcggacgttacggtgaaaacttggcatggagcagtggtgatatgtccggagctgccgcagtgagattgtgggtcagggagaagtctgactacttccacaaatcgaacacatgccgtgctggaaaacaatgtggtcattatactcaagttgtgtggaaaaactcagagtgggttggatgtgccaaagtcaagtgtgacaatggtggaacctttgtgacttgcaactattctcatcctggtaatgttaggggacgtaggccttactaactatatgtgtacgcagacgaaagaaacttgtccatagaggacgtgtgtgttttctataatttggaataaatgatcaccatctatcaggatgtggtggttcctttgtacgtttatagtttgtataatattttgtcatggaataatacttttttcttgtgtgtgcttaaaactgtaattatcattagatgatgcataatgggagttattaatatttcaactggaatcttggcatcaagattcagatttccgtgtatgaaattaacaccggatacttttgttatataaaccgtcaagaatagctaactatttatgtaagtgaaatctaaaatattataactttatttttactaatgcatgatatcaagtatcgaatctcttttaatttaagtcgttcaattagattaaactataacagcaattattatgtttgaaaacattctgttaataataaaatggccatcttgcaaaaagaaagaaaatagttaaatatgatcagccatcatcacaaattagtttaaaacaaaattattcgtggtggctaatattatcaagagttttttagccatcctaggtcgggaaaacacaatagtcagcgatgtgaaactccaacaactatgcatttttatggaaaggtttcctcatttttcagccatcctaggtcgaaaatacacaaaatcggtatctgaatattaatgaagatgctctcatatcgctacactcaccattaacatcttaattaaacatagaaatttaccatcgacaacgatagacggatgatccaatccatgatacagtataaacagttacgaacatggcaattactctatctacaactactatacgtacatatgtcaggatctccaaaaactatatacataagacatacttttttttttgctaaactatataagacatactgtaatctgtattattctctactaattgttaagttttatacataaccaatatgagaatgcaattcatcatatgatcagaatttcactaaacacgtcaattactatggcgtgtagctatgaaataattacacttaatcaattggccatttggcctactatattagaccgcagatgtatacgttttctaactataaatttgtaaattaaatttttgtttgtggaaaaaaaactaaacattataaaaatgtattcgaagatacaaaactactatatatataacgtgttcaatcctcacttcaaaaacccacaaaaactttagaacgaaaaaagatgaaaatctttaactcatctcaaaacctattcttggccataacctttttccttgttctcatagttcatctaaaagcccaagacagtcctcaagactttttggcagttcacaaccgagcacgagccgaggttggggtgggacccttaagatgggacgagaaggtggctgcttatgcccgtaactatgctaaccagcgtaaaggtgactgcgctatgaaacactcgagcgggtcctatggagagaacatcgcttggagcagcggtagcatgacaggcgtagcagcagttgacatgtgggtggacgagcaatttgactacgattatgattccaatacatgtgcatgggacaaacagtgtggccactatactcaggttgtgtggagaaactcggagaggttgggatgtgcaaaagtgagatgcaacaatggtcaaacctttatcacttgcaactacgatcctcccggtaactgggttggcgagtggccttactaaaagaaaactccatttaaatgttttcgaatatatgttatccacatgtatatatgtattgtttccatgttgttcagttataccaatcatctatcgtcagctaataaagattggtttgtgtggtcctggtccggtccggtcttcttttgtaccacatgtataatgtatgcgtggatttttataatggaataagaaaaatgcaatgctacggcttgcacttgctttgtttgctatatgaaaatctcctctccttctatatatacacattaattaatacatgattattcaggtttttattctttgcatatcaaatttttgtatctacgtacattcaaaagaaaacaacatatgtaccagatttccttttttaccaataatctcttctagattgttaggttaagaacaaaaaagtcaaacgaaagcgtgctatcttttcctccgtttgcgtttttagctaggttcaatattaaaatatcaatttacttaagaaaatttgtagagatgtgtttattgaatcgtaaattcaactaaaaattaaattatattaaatataaatatgcaaacacaatcagaaaaatcaaccgataaattgttgaattaaaataatcaaaccctttactttttcatctccatatgaattaacaaaaaaaatgttccaagctactttcaagcgatatctccattaaggaacaaaaaaagtcgaagccattcatttcttccgagaaacagagattcaatgttagcataatatgtttttgtggaattaatctccgatattgtttccactcctttttagtctctttgatattattgtatagtatccctgtatgagacagtgactttatattcggaagataagctatagatgaattatgttaattgtaaacaacgttagctataataatattttcacatcgacatcgtctgagagtgcctcggtcatccggctgcttgtgcgaggaggctgcgcactatactacgttgactactgtaatattaaagtttaaacacatttgtaaattgtgattgaattaatataagagaatatatgccaaggtttttaatccgttacgttagctgaatttttgaaaatgattttacaccaaccatagttttggtttggatactttggctagatgaatagccaacgaagtgaacttaaaattttctcgtgtatatggtatatatattctcctcttttctgtatgtttttaatatatatctatcatgaattttttttcctcaccatgaatgagtatttgctttatttatatggacctagctagggttgattaggtccgcgcgctaccatctaaatagtccagagaaacgattgaacaaaaaatattattcatagctatctgagacttaagcgatgaatggttaaactttattacgttctttattgatcggttgaacgaaaaaaaaatacaagtcccattttataaaataatatctaccaatccatagccgaaaccaataattgtaaagatattattccaccacccttagccgaccgagatactcatcactatcaactctacaatcatgccacctttttttgtgcacacctacaatcctaataattaacgtgcgtacatcatttcacaatgtttgaaaacctttttaagtatagtttctaatccgatttacttcaaaacgtgacaccaactaggccattaactatatataatatatgtacattctatataaacatcttaaactttctacaagtatccatcaaaacacacaagaaagtcatctcacgctatatttgttccatacattttagaaaaatgtttcataaggttgctattgaaaccttggttctcctacttctcatcaattacttgacacaaatcgatgtttcctccgcacaatactctcagtatcctcagtcccatgaatatcctgacagctaccttagaccccacaacgcagcccgagccgcggtcaaagtcaagcctctaagatgggatttcggtatagccactgtggctcaggactacgcaaaccatctagcctcaggtccatgcagtcttgaacattcctctggaccatatggagagaatcttgcatttggcagtggagacatgtcggccgctcaggcggttgcgatgtgggtacatgagaagtcgtactatgatttttactcaaactcgtgccatggtccggcttgtggacactacacgcaggtcgtgtggcgtggctcagctcgtctcggttgtggtaaggctaagtgtaataatggtgccagtattgttgtgtgtaactatgaccccgcaggcaattacattggagctagaccatattgatttcaaattcaattgatgaatgtgtgtaaagattgtggtattgattactttttttttcatttgagaattcagtacatgagaaaacattacgttaaaatttgtgtaattacaaaaatgttcctttttgatcgcataaccaaagatcacggagaagggactttccataatgctatggtttatgccgttgttattaacaacttgttaagcgctgatagtagatatttgatctcatcatgctggttttatggagattagggaacagcctcagaacagcccatattaactcagttttgaaatttgaaatccttcttattgggaataactatgttataccattaatttcgttgtataaaaccattaatctctcttgaattcactcctgctaagttcttaattatcgatggttttattggtgaattagtatgcacaaatttaaacgacatattatatttttcatctactagttaatgaaaacataatagagatactacaggctggggttaaatggtttctaaattagatgattaatttaattgaaaaagtggattttcatttttataaagttctaaggaaaacttgtagttgtggataacaaaaaggttttttttttttttttcatttgaaccattgtaaaacccaataagatataatagttgaagattttccaagtccgaaatacttagtcacattgattggaataacaaaaagaccttctgataatttaaaaaaaaaaaagagagcatgttgatagaaaaaaagacaaagagaacacatcagataatatatcaaatgtgtacttgctctctcgacaattctatttcttagactaataaaatggtcttgtccccttctctagtccactttgaccacttcaagaatgactcatacacattaggttacctataaacaacaataagagagcaaggaagtggatttctcttttttttttttcaactttcaatatacacataggagtttatttcatttttctaacaaataaactagaatgatcttattttattctttccttttttcatgaaattgaagaatttgaagatcattgaattattgcaactattaatcatttaattttttaattttttttgttatcaataattgcaattattagagaattattcctaaaaataattaaaaaaataatggagtagacaatagtcatagcttcaccatctttgcgttgtctgggccttacctctgtccttcacactctttcctctgttcaaagttttttctctttttttggttctttaactataataaactcgaagctctaaagaaagcttctctgtcttcttctcttagataactcttactcaggtactcccttcctcacaaaacttttgtttcttttgagttgtctccgaatctgattcttgtcccttctatagctcatcttttcctgttatctctttctggatgttcttgattttggctattttcaagaattggtttcttgatttgacttcttttagctgttttaaattcgaaacttgttcttcattgaatttgtcttcaagatttgggggttttaagtactcagtctctgtttgctgattagggtatcaacaggattgtaattactttgatatattttccttttgcatgtcacatcttctctactgttctaattggttttgaggggattgattatcttttattctataaaagctgtttctttattgtcacaggttaaaaatattgagttatggttttttgtatagcagctgagaagaagtattgttgaagatgaagaaaacatcaaccagaagccaaagaggaagcaaaggtatcaaagggaagcatgtcctgcagatatgtgttctgcttggagtatgcatttggttaatctatcaagtgaagtattctcatgataagaagaaggaattttatgagaaagatgtcgagaaatcgacggtgttgttgtcagaggttgaagatggagtggtgaagcttgggaggaaagatcttcttcctaagaattataaccagaaggaaaacgagaagcacgtggaagaggatgaggatgaagaagagatcagtcatggaggtgaagagaaggagaagaagagtaaagtagagaatggtaatcatgaggaggaggtggagaaagacgaggaagaggaagtagctgaggatgatgaagaagataagaataagcaaggagaggaagtagctgaggaggatgaggaagagaacaaacatgaggaagatgagattgatgaacaagatcaaagtaaaaatgctggagatactgataaggatgatgaaacacttgaagaagagaaagagagtggaatgagtgagaacgatgagaaagaaaaagagactaatcatgcagatgaaattgatatgacagttgatgaggcacgcgaggagcattacaaggctgatgatgcttcagtgctgtgtctcatgagtctcggatactgaacactgagaaactgaaagaaagttcaaatgaaacagctcaagagaacaatcccaatggcgctacgagcgaggttgagatccagaaggaacctgacttgaagttaggagaagcagaaaacaccaattttgtgaacaaaacaaccacagatgtgaaagatggtgacagtgaatcatccagttctgaaacaaaaagcgcggtaactgaatcacaaagtgaaacagttaatggcaattcgacagtagcactttttgaagcgtcagagtttgtgaagaacgaaacagaaatcatgagagatcggagtcaaggagatggtgcactgcctgcaggattctctgaaccacagccgcccgtcttggaacttgagaaaaaccgtaacgaatctgatcccgacatccctatttctgctgacattaccaacaaagatttcattcaagatgagtctaggaactcaacttcagaatcttctctacttgaaaacatcgctggctcaaacacgaccgaggtgaatgagaattcaaggtctgaaggtgatgatgatgaatcaggtgaaaaggaaagttcaaacattttctccacagagctaacagaggaggcagataatacttccggaacgtcgatttcccaagaagagatggatgctctcactgatccacaaactcttcctgatataagaatagaaggcaatgaagaagatgaagaggaagcaattggagcagagagaaagaaactctagtggaaaaaaggataagttaatgtaaaatgtttttatgcttttgcagccatgtcattgtaaaagctaaaaacatcagtctgtctctgttacttagtttcgcaaatctgtatattattcatttggaacttggctacggattgctttcactgctctacatgaaacttgacttcaacactaatagtagaagaggagctcaatagtcagttaagtgtcctgtgatcaactctgcgagtaattaaagctgcagaaactcagaagacatgaatatctgaccaggactcgcttgttatagatgcatttggaatatcaactctataaatgattattgtgggttcattacactatgtcaaaagtgggaattttgcaaatcacttctgcaaatattgtttcaaaaaggtgacattgataacaaatttctttaaaatcaataaccaatgatgttaagagtaaacagaagatacaattgtttgtgttgagagctattatttggtgcggatggagagatcttgaagctgctttggatcgacttccgagggagtccttgttagggcacattgcgctgtggttgtctttggaaaggctattacatctcttatggaactcgcacctcccagcatcatcaccattctatccaatccataagcaattccacctgtaatttcatatcaaatactaatgtttcatcaaccatgcttgaccaatcttgtttaacatcatcatcatccagtgtcaaaaaagtttaagaccccaatttctcttaaagatcctaggcagaaacttgttccaacacaacaaaagagaggttgaaccagtctatactcttaagcatatacgtaacgatgttgtattaatctattcttaagtctcagattttttgaccttaagaaatatttacataccatgaggaggagcacccatgtcaagagcctccagaagatagccaaactttgattcagcctgtatgtagggaaaaaaatgagatatggattatctgcatatatgatagcgctggcactctgaacaacaaaatggatagtttccaattgataaaaaaggtgactctcacctcttcaggtgagatgccaatgatctccaaaaccttttcttgaacatcccgcttatatatcctcaaacttcctccaccaatctatatacataagaatttttctcaaaagatctcccaagccattgttctagagagaagaaatggtcaagctgtttacctcgaccccattatagaccatgtcataagctagagctcgtgcagaaggcaagtcatccatatcttccggcttaggagctgtgaatggatgatgtaatgcctgaagagatatgccttttcatattagacaacatatttggatattaatctcatctcatgcaagaaattaaattatgaaacgacatacctcaagcctctgctctggctcattccactcgaacattgggaaatctgtcacccacagaattgagtgcttggactgtataatatagaagaaatggcataaatctgagtctgtcatcaagtggaacaaaaaagtgtttggccaatggaaaaacttacatggtcaatcaaatccatgtcatgggctacaaagagtcttaacctatctagggttttattaaccgaagtaacaggacccactccaaataatataagatcaccaggtgctgctccacattgtttcacaaagtttattttacctgctgagtctaaactagaaactaatgctgcaattccctcgatctcgcctgcatcataaggttagacctaattagagctaaaagtacacagaattattatatgactattaggaaaagagaaaaaaaaatcgaagagaaaaaagtaagcttgatttatctatttaccattatccaagaccttcaagaaaggcagaccctttgctccggatttcattgcttcattgtaaatatctccttttttgagagctgagtttgaatactttttagcacccaaaggcacacacaataccttaatgattccaccactttcaagggcctctgtaaaaaccctgaaggacgattctgtgaaaacgtttgaaacctgcaatttcagaagcttgagattttaactttaaaatagacttcagcacagaaaatgggaaacagctctaaaatgctcttcctggttgaagaaaaaatccagcataagcaattattcccatgcacaaaaaaaagcaggcaaagagacatatagatgcttctttgtaacattagctaaaaaccaagatgtggataatattacatctttcaactcgagatcaaatcttgtatcaggtctatcggatccataacgatccattgcatcagcatatgtaagccttgggaatggatcaggtagctggatacctttgatctctgaaaacacctgcacaagaaggtcaagcaatcaaaattgctgacagcacattactaatttaaagagaagagatccacatacaaaatgagctttggaatttcaggacataaaggaattactagaaacatatcaagaagcaacaagtttgtacaacattgagccacatgcgtcattgtcacagaagatacaaagtcataaaaaacagtttcaacagtactctaaccttacggataagatcttcattcagcttcagcatgtcctccataggcatgaaagccatttccatatcaagctgagtaaattcaggctgcctatcagctcttagatcttcatctctaaaacatctgatagtagaaaaaacaaacgcatgagagagaaatcatttgcatcaggagtcctgcttttggtggtaaatgaaggtgatgagccatttatgtcagggaggcttatgctgaaccaaacttaagtgccaaagatcatatatatacctggctatctggtaatatttgtcaaaaccagagaccattaacatctgcttgaagagctgtggactttgtggcaaagcatagaatgttcctgacttcgaaagaaaattagatagaatcagacctataaactatgatataagcttatacttcagggaaacttaattctttgttgggaaatacattaggatgaaaaaagtattggcacctgaattcttgacggaaccagataatctcgcgcgccttctggagtagatctagagagtattggagtttcaatctgacataaacaacagaccaacatgaaaaactgggaaatggccaaaactgaaaaatataaattagatttcaaatagagtaggaacacacctcaataaaaccatgtctgtcttctaggtatctcctaatcagcttcaccacattatggcgaagaactatattattcttcatttgctgacggcgcagatcaagacatcgaaatctaacatcatacaagccaaatccaaaacatgagttagcatttggagattcgatacgataaaccaaccatgcaagatcaatcatatatctaatatttcaccttaagcgaatttcttctttaatcaaatctttgttctcgtctgcagtagtaactaagaagggaagctttgtcctcacaggattcaatatttcaacatgctctgcaactacctaatgcaacatactacacacatcaacgttacatataggatatataaaatgcagctgagctgaatgagaaggcatacctcgacgaatcccgttttcattttcttgttgacggactcatttggcctactacgcacagtaccttccaccaaaacaacgtactcaagcctcatgtcattgatcaagccatgtgcctcaggaaactcatccggaagcgtcctaacctaagattataaaactttcaaacataaacgaatcatacagtccccaaatatccatctttgcgttacacaaattgggtaagaaagaattgaaaatggtcgaatcaaggataatcatctagaaccaaagaagcaactaaagagaaactcaagtaaaatccaggaatcggattgaattaaactctactcaattgtttcttattcagattcaacaccaatcactgagtagaaagttcattgctgagacgaaacttctaaatactaatctactgaaacattatgcttcacgactatataatgcaaaaaagcattaggtgaaaccttaaacctggacaatgccggtatgatctctaagattaaggaaagtgaggccaccatgaactcggtgaagggcgacccatccgcaaaggtggactcttttaccaacatcattgactgataactcgccgcatagctctgtccgtgacacccaccggagaaccgacggaggagatggaaccggcttcactactacatcgccggaggcagctgcaacaggggaactggagaaggttcttcgagttccgggaagtgggtttgtccgtttgggtacgacgaagaaattagtagcgttagagatggatatggctgtggcggagaggaaacgagtaggtcggagaggcaaagttcgtaggaggagagacattgttgggtgggacgagagttagataaagagagaaaaggtttaagggattgcgtttttagagacgacgaaatcaattcgatcgaaccggttaagattgattcggtttatataacgaaccgctatggtcaaaataagaattcagatatcgtttggtcaactttggatgaagagacgtttatttcactgaaaattcaaaatcagtaatcaaaacttgtttatctgatactgcttccaaaagggagagctaaattctgtacaaatccataattagacattttattatttgtcgcttcttagtagaccatctaaaaactgccgccattttctttcatttacaatgttgtctcttcttatatttgacctgcgccagattttggaagaaatctacaaagacttgctcgtagtctggcagttttccgtaacctgcaaatcgatatcaaacagagaaaagttcacttctctgcttccatgagagaactacacaaaagcttcaaaaataagggaaaaacttgccaggaaaatagttgatgtcaataacataaaacacgtttttgctcccatgttccctgatcatgtctatgttgaaaagccgaagtccctaataatagaaaagcagttagaaattatgataatcaaaaccggatttgtaaagtaaaatgtggagaaaggcagctaaaactataccaataagcttcttagctctttcacaagcgcctcgaggaaaggctttggaggtagctcagcaacacgagggtccaagtctgcgttatcagctgaagcagcagctgatgaaacccttgggaattggaagacgccatcaactttggctttttcacaattactcacatttggtagagaaaaccgtctcatgacttttataacatcacccaccacaaataccttgaacataactccaccttcaggcaccaaaaaagatgcattgaattttttgaaaacacatatacatgggacaactgcgtattgaagtgtcatattaaccaataccatgattaacaaactcttgaaggactaaaggcggatcaagctctgcaagcgagcgcctgtcataagccaagtacaattgatgtgactttgcagtcccatcgatccagagcggctttgcaactgggacaaatttgaaataaacaagtttaaattcatgatcatcatttatacatacaagaatattcaatgccaagataatatgttcaactgtacctagtggaaatttgagaccagcttccacaactgcatcagcactagctgctgaatctttcaagacaaccatttgctttggaacaaaaaggctgcctacaaatatttaccaaaagcaaaaaatcacttctagagaaacttagaaaaggtcttaaatttcgatgtcaaaagaacttattgaggattgttaccactgcaatctgacagtttcaaatctgccataccctgaagcatcgattgtcgattatatatacgctgtattgatcctggaggatcaagcacagtcacttctgggtgtttttgttggtaatcctacaaaaacggtgaaacaacatgagattgtatttgacaacatataatttccacagactgaaaaactgccccagcttaacagaagtctttcaaataccactcaagggttaatacctttacatagttcaaactaagaaactcaaaaccagattggttaccatcttcaagcaagaaactaaaaccagaaacatataagaaaagtagtcagttttccaaacctcaataacctcttcccactcttttcccaacaactacaagagaacaatcatataattcattagacttccagcaaaaacacagattaaagctcagagagttcttagttctcacaaaccttatgcaaaacaacatcaaatggcccttgttcagataggggccggttcaaatcgatggcgacaaagaaaatgccttttctcctgaaattgacagacacaaaaagtattactagcattttcttgaaaacactgctgaaagaagaaaaagaatgaaagctatgggttgattagaaagaagcaaaacagagaccagacgtcaaactaaaccaataagaaatgttctctctgacctattagagacattctagaagatgacatattaagtagaaccagtgattgctttaacaaaaacacccatgtggttgaagaagatttccaagccacagaaaaggcaaaacatctaagtattttattttttaaaagccagagtcaaacctcaatagagactaatccaaaaggattacacaaggaatattcccatagaaacatcctgataccacaagtagagtatactagtgtaagcctaaccctaagcaaaagagccgattaaggacaaaaacatggcaggtgacaagacatggcaagtggcaatggtcctcatagaatcaggcaaaccaataataggtaccaaaacaagagtaaggaaacaagaaccaaatctggaagaaaatgtcaaagtcctaaagatctttttgaaagtagaaaagagtttgtcggttatgtttaaacgccaacaaaggaacagtcgtctctcaggaaagaaaaagcagaaccaaaaaagattgttcaacaaatttggaaactttgcaatgaaaaatcaaaactttataactccaaagaagcattttgggtttgttattggttacctagcaagaagttcaagcttgggctgcaagaaactcttcttcttcttagaagtcagagcatacccaacaacgagcttctgctgctgctgcagaaacaaaggttgttgaaactggaacggcgtcgtttcgttcaccaccacttggtcttcttcctcctcctgctcttcacctttgtatggcaccatgttttccccttcgaatctcatagcaaagtcttcaaatccaccgcaggaaacccctaaattggacgtaatccccaaattacggttcagtctggcagtttcgatttcgccggaagcaagagtcccaaacattaatagaaacggtataaaaaagaagaagcaaagggagaatctttaaatattcctctcagattctatatccgctgacacacaacacaagtggtgaaattggcactgcctacaaacgagatagagcacgagaccgagagagagacagagagagataaatcaaaattcgaagcaagaaatcagagagatgagatgaggaaatgttgagggagagattggtctgatgatcaaatatatttatagagagaataatttgcagaaaaacagatgctacagtgacatggtcgttcccaaagatttgctgctttttttggttattcttcttttctgaatacatttattgtattttctctttctgtttttttttttctcaagatgaaaccatattacaagcaacttgaaaagtacaagcgacaacaaaattaaaactatatatacttttttttttttacaattgtcaaatacactaaaaagcggctatagtttccacgtattctcctcgtttttttttccctctttttagtgaattacacttacttctacatcaaatacatcaatagactgacaaatcgtattttgagtattttaatattattactataatgaatttcgttagataacgatgaattggcttattgttaactagtgactgagcaagtgagcagtacagtaaacgagcagtacttgtaaatttgtgtagcatgactaccatcaaaactgtaaatagccataaggtcgtgtgacaaattttccaacttcgatcacaacaaatgcaacaagatttgcttgaagcatgtttgagccttggggttgtaaaagttagaaacttcgatgattgacgtaattacgtcaccaaatcttttttagtggtgagttcctattcgcgcctaatggtccaaagaaccgaaaatggacgatgtctgccataaatgttggatatatatttgagtccataaatgtgttcttttatagcaaaataatcggaaaacaaattcaaattggtattaaaaaggtaaattatcaaaaaaaaaaaaaagaggtaaaaaaacaatgaaacctattggaaaaaaaacctttggtcagctgttgttgaattatcatatgattgatccttgctaattgttggatcctgaaacattgatgagaaaaaatcttagaaacctttcgttgatctattttgtatatgattaagtgtcatccttcttcatatacgacagcggttccatgatgatggctcacgaccggcccccagcgccttattaagacctatctaaatcatcgcatagatagttgacaaaactaacagtgatgacatatatatttgctaattttgtagaaagctagtaatcaaatacaatttgattgtgatttctacttgtaatagtgcttgggcacctttaagattcttgttttcctcatggtcaaaaaccttttttagatgtttacattgagcttccattcatgtagggtgatatttcagtgacaattacttggttggtccatagggtcctcgatttgacgacctttctaattctgtgcttttctaagacgattgatatttggataagcttgtctggttcttaaatctatgatcgttcgcacacgcatgcaaatttgatatactagtatagtcttactcaccactagccactactataattattttttaaaaaacttttggatttatttattgttgcacacaaaagttaagagagaaaacaactaatattttatgaaatggataaacaaatgttgcaaaatgttttaacatataaccttgagatcttttctagtggatcaggtctctttagatcacacccaattaagaattattaaaaaaggtagaggtaatctactgatttccaacttaaattattgataaatgcaatatactttatagaatatgttaacgatgaacaacatgcaagggaatatgctcctttttgttaggcagcagagtatagctagtctcttgtttctgtcagaatcttcctttagttttaggtaaatttataatatcaaactaacatatataaaccttttccacgtttaaaactttctaatgtaattactaatttagctatcattcacaataatacagtctatttatgtttcatatgtttaatatatttggaaaatgattactttatgttatgtatataatgtaagtatatatataacaaacaaactttcattgatcaactaataaagactagtacttttaaaatacatcatcattattttgcaaaacactatatataagtctagtgtatgattgtgttaccatgtataaataaattcgtcctaatatagataaaccagtcaccatttattttttattcaaattactaaaatacaacttcgtatatgttgtttgacctaattcttaagtagacattttgtgagcaaatttgttttttcccaaattgagatgtaaaaaacggtaatatgattttagcattcatatgcatatggtgcagatagaatacgatccttgacttaacactgacatagacttatcaagtgctgacgattaactaaatctagaatcatataccgtgttgacttatcgcttaccggacatcaatgttcatgtttatgagaatataatgtgccgtcaaatatatttgcgatggatcgttacttaaaaagtaatgcatatgcttttattctacacctgacactgacagttgacttccatagaagctgagtctacttctctatttttggtgaatggaatatttgtatacttcaaaaagggagaaaaaaacatctctctataagaatatatataatgacaacgtcacatggaaattatccaagtgcatgcagttatccttattcgatagatgggtgttgtttcaacggatttggattccatgcggatttgtcaagagtcagatcatttgaaattctaagtcctaattaagaaagcaaacatattaagtagggcgacagtactgctcgacatagatttctatattctcgcaagtagacgagtatatatatgtttcttttagaaaattttattttggagataaaatattattagtctattataaaaactttatacatcagtcaatatatataagtatatatatatatatatatatatatatatatattgagataatgtgcagtgtgttgtgtctgtgtatatatgtgaaccattaagtgggaataaaaggtacatacgaacatcaaacttcaaaatgcatcttagtggaatttcatacacccactaatcttttggcattattgtcgactttttaagaattttgtgggtgtttagttttggtttttgttttagatgaaaaatacatgcctatgtatcgtaatttgtaagtgcattagaacatatccgcttttaacatctaccttgtaaacatctcttctctccatcgttattattctttacaataagtaataacacatgagaaacaaaacgttctatagatttctctcgctcatttctcccaagtaaaaaaaaaacaagaacattaatgggtttaacaaaagataaagaaagaaacaatattggtgtattcaaatagctagtgacttatatttaagcccacaatggaccctctaggcgtataacgactaacatatatttaaataagctaacaacaaatccaatagaaggcaaatatatagtcttctgagctggcaaataaatcaagcggaatctgtaccaaacatttaatagcaaaaccgaaaaacaattgtttataaattcctcgtttgatcattattgttcaaaaccaatctaaagcctataaacttatgaaagtttaacatccaatctaaatcctttttgtactcagaataagaagttgccgcacactcaagctagagcctaaaaaaaacctaaaagccttgcatgaaggttgatatactgtagcggtgaatgaaatagagaacgttttacttggctaagcgcaagttgttcactgacaaagcgattgtcaatgtgattggtgcgggtggtagtgaactggattggaggagagatgaatacaattttggttattgggccgagtaaggcctattaaagagaaattaaataattcattttaatctcccaatcagagaattctaaccataacataccgaatcggagcaaaccgtccgaccataatgcgaattttaatttcaaatccttacaacaaatcgaaacgttatacattaaaaccgtaaagggccaaaggcccataaagccgcctaataataacaaagaagggtgaaaaatggaaataacaaagaagagttttaaaaaaaggaaactttgaatccaaaaaacaggagtctataaatatagagagtctcaagccttctcttctctctatctgtaatcgttttagtttcattaaacaaacccttgagaaatacacacagagagaattatagagtgggagagatgaaattacatacgcaattgctctgatttgtttctccattctcttcttcgattcctgcttcgattgcttctatttcatctctaatgatgctctggttcttctccttcctttgtctctcgatcatggcgtaacgataacttctctcagtctccgtcgtcggaagtttttgtacttttgtttgacttcaaaggacgtcggattttgtttactctgtctttggttcatcggaagcttttgcgtttctcagtcacggacacgctttggttcattggatgatcggattatcggaagcttttgcttttctcagtcacggacacggtggtggggaaaaaggccttggattgcgaaaggattttcagcccatgaattatttgaggtatatttttctgtcccatcatatttaatgttttttgtttcctttgtttttttttttttttttttaattttattgttttgatactaaatttatattacgatatatgaaaactaaccggattttggatccagcattagttgttagagattccaaatattcaacttgtattttgtaacatcgttatgtaaattgtttgtatccaagtttttaattctaacttttcaaatagcttttaaattttttactttttctattcgaatttttaaaagttttttgtattttcttattttaattttaatgttttgatactaaatctacctaatgctatatgaaactaaccggattttggatcctgcattagtcgttagtgattccaaatattcaatttgttttcatatcatggttacgttgattttagtatccaaattttttaaaacagttttaatttttttatatcttttctattccgatatttaaagttttttagtgttttttcataatttaaatgttttgatactaaactaaccggattttggagattctaaatattccaacttgttttcatatcatcatagttatgtagatttagtatgcaagtttcacatgagattcccggaaaagtgcagctgaagtattgtacatcatccaccaaactttgatattgttgaatcggccaccatgggactattctggcggcaaccttaagacttggtgttgattggagtaaatcaagaatcgccttctctttgtgaatgaattacaattcgagagcagaaaatagaagccaaaggggtgaaaaattgaagtctactaattttggttatatatacaaaactagaaggaaaacggtatgttctatatgtttggtttatttatttagaaactaagaaaacatggtcaccattggcgacgacttagttcccagttgagctacacaccagcatagctgacttggtgaatgctacaatattacactttttttacttactaaatcatcagacattgccaatgaacatccactgtaactgctttctgattctgaactcagctgtggttttattgccttggaagaacctaaacaattatggctctcccaaaagtcagaattctgatttctacaagtgtaaagcgaattcatcaggaaactggttgcatcccgttccatgcacgaggatcatcagcgagttcattgatcctattgttgcggctctcttgcatgtatgctactccggcccaaagtccacgtataagtagaatgctcgtaaatacaatagttccaagtgtgcaagctacctgcgttccacaccatggaaatgaaaataaaaagccaactcaacagaaaaaagctaccacgctgttcgttaagtaacacagcgcattgcccctttcaaagatataaagttggctaaacattgaagaatatgaacaattagctcaagtattcaagaacaccatggcgagtcaagtaatgaattaagatccagtcatttactatgaatgagaagaagaaaaacagagagatgtttaaattgacttcagtaacattttctaattagttagacactcttagcatgactttatataatccctgacactgaactcagtgcagctcatcaacaaagttctaagcttgatgctaccctctctattcatattaacggtagatacaaaattctgtcatagtcagtaaatccgataacaaagatatagcaatcaaagggcaacaaaacaaaccactccttgttaacttcctaacgaactaaaccaactaaagcatgctaagataatcgaataacagggacattgattccaagttcaaatcttttaagaacatctaagaacaattctttaattcaatggacttcagagtaattacctcgaggaaagccttcaaaatccacaaaaaagcaagaataagtactccattcactgaaaaccccacctaaattgaaccaaaacttggtaagaacattgtgatccataaaataagtctctttaagattatagatttgattgatccataaagtaagtctctttaacattatagatttgattagatactcgaagggaacatcattcatgaatgtaatcgaagaatcagctagagacttacgagcttcgtagagatcgaaacaggcaaaattgatcggacagctttccttgctctcttagaaatctttctgaaaacattttctacaaatctaagtaacagatccaagcttctatcttcttcctcgtgatcatcatcatcttcttctccatcgtaatcctcatcgaacccatactccggtttgatcttccggttccagctcctcgtatcgtcagcgaaatcatccctcccctgtagaaaacccaataaaaaagttcagaaattgaagcttgtacaagtagaggaacagagaaaatcgaatttgtttacgttgatgaaatcgcgggatcgccgggaagcaagataagggaaaccagagatcctggttctggtgaagattagggttttgggagtgaagatgaagaaagagagaggcgatcgaagaagcgcgacagaagaagaaggcgatgagattgatgcggaaaatggcatcgttcgttatgcatcaacacgctcactttttttttcctctggtcgatattaatgcataataccaaaatataataaatctattagaatgacgtcaaaattttattaattagtatttatcattgttgattgaataactatatatttatactaaaattgagttttgattttagatgaaaaataaagttgagtttccaataataaaatgatttgctaattttttttggtcttgctatagtttttggtaagatgttaattttgtaatgaagctaaactttacatgggggcaatgtattttacacatacttgattagagtgaaatataagtgactcaaaataactttagagaaggagaatgcaacgcttgaagattatcgattgtcaagagaaaggtgtagctaacgatcatgtgagctggtgctggaagtagtgaaactctatagtatagtgacattggtgaatatcaggatattgttagatggaataagtgtttccgatttgatatactatatattaagtgatataaaaaaacacaaggcgttgaagaaaattacatccaatatatagtttcattatagagataaacagcccaagtctataaccaaatttcgaaacatagccgtatgaaaacggattaaggagaacgatagtgtccacataatttatactcgttgtagtaaaataagataaagattatacaactaaaattattagaagacatacttaagcagcccaataacatgtgtgttcaaaaaatagtcgtcccaatcgagaacctttggatcgaaataaaacatctcgttttcgactcccgtcttcgataccatttttcgcaatttttctgtgtttgaatcatcaaatctgcgcatatacataatccggttaattagtataatgtggcttaaaatctcaaaccatatcagaccacacaaacaattaagaaaccaaattagaaactgaaaaaagttacttacattccatagaaaaagaggtaaggctgatagagatcaacaagccggaatataaaatttattttcttattgaaatactgaaattccttctcaaacaacttgcaaagtattatgtttaccaattcaagtccctgaaatgaaccatatagatatttaggaaccatataaaaacactagttaatatatcattagatactatttaccttcaatgcaatcaagtagcgtatggtcatgtatctatggaaactacgcatagaactcaggatctcaatggccccgaccttaacgaccttcccttctttgttggtccacggtttgattgagaaataccgatacgctaattcaggaaactttgaatttttcatcggatttctaagtgaagaacccacatggtaaataatctcttcttgtttaccggcttgagcggccattgatacaagaatcgaatttactaccatatctgccggcatctggtcccattgtacatgtccgaaaaaacacaaatgaagatgagtaaatgatattcaaatattaatgttaaatgtcgaattacgtaccacatcagaaacagcatcaagatcacagaggaagcacgtgagtttgcctttgccatatccaacagctaaactatcaatagtcctgtatattaaagaatagttatttcattgtcttgaatagtaaactgtctgatgaaaaaaaaaagaatagtaaactgtcaatatcatttatttattttctaacaaaagagcttttgataattttacctgatgccctcagtccaaccaggaaatggttctttgaatgtgctggtaataattgaaggacgaagcaacacaagtgacagattttctctttttgtccctaccatcatctcccccattgctttggtgaacacatatgtgtttggccatccgtacatctttgccctattcattataatatcatagccactttatttcaaagtatttaacactaattaacaataaaatatatacgtagggatatgaaccgtctgagtccgagatccttcatggtttccgtgatggtttcaggagcggctccgattactcggagctggtcaagtttctcctgaaccaattttttctcgtagttgatgtctaaaccggtggttccattcaacgtctcacccatacggtacggtgtttccattatcaagccagatttttctccgcacacgtaagctttgatacaaaattcgttagttgttggcatttagttatataagcttctttactagtactatccaagaaaaagacattccacaattatgatccaataacattttttaattttttgatcaatgtggtcatgtggatagtggatactggatagattggcaaaaatactggagagttgcaagtttttctttcatttctaatgttggtagctcataacttgtttgttggtagttatatgtcgaaatcagataacttaggctgatttatatcggtgtcctaaacccctaatacttagtacatagtccctttctatctaattttccatgtgaggatgttttatatatatatatatatatataaacctataaaactctcgcacaaataaaaaagaagtatgaaactcaaaattaatgtattaatcgtttcatacttctaaaccaaccttctcgaccataatatgaaatcgtaaacgtatatatattgaaatctttctaattttaagataaggattaggaaatcggatagagggactaaatatttcacttgggtctaataaacacaatttattacagtctcattgacagcatagtactttgaatatacctgttgatacatgaacaaggatcttaacctttgcacatctcttggcaaagttcaagacattgagagcacccaatgtgttgatcccaagagctacatcgtatctgcagatgaattaattaacattcctttagttttacagtatatataaaaaatgtaactaaaaattataatttgtaaaacatattccctcgggacaatgttgatgtaaaatcaatacctttcatcaaacttagtagttgcagctaaattaacaatggcatcaacttggtggatcatctcatgagccaagtcgaagtcttgaagacctaaatcctcaaggcaaatgtctccgtcgacaatagtgattttctctgatgtaagttgatttagattgggaccatacttctccttcagcaccttgaacaaatctttcttcaaaatctgcagcgattttaaacacctcaaaatttataaaacttccatgaataccatcaatccacatgagctttggaaatatttgaataacactatataactatattatatattaaaataagggatgtaatcatttcatttaagggacttttggttaaaatacacttgttttatttagttttatattaaactaaaaatgtatatacatatatttatttatttttataaaattctagtttttcttaatatttggtcaatttccggaaattagtaaaaatttattcactttatttctgcttaaaattataatatgtttactaattggtaaaatattataaaaaacccccatttggatatttttgtaaatttttgaattattaggtgatgtttaatggataaaatataaaacttctattttctagggttagttgtcaagggaatttgttagggtttatgttaagatatacatgtatataaatatacacataacagctaggttatcaatagatgcgcagtttattgtcgagattgtttttgtgtgtcattttttaacacaaataccaagcctatctaacaacaacagacattcaaagcctaattagtatgtagaaacaaacctcgtcgttaaacctctgggtagcagattttccttttgatgctcttagaaggagatagagtttcttcacgtttggtgccacccttaatatcttctccacaaagactgcaattttatataaacatatataatcacactttaataaatttaagagctagtttaagttgcttaataaagaaaatggatacagtgttagtgcaaaccactagaatattgttgtagtcacatatactttcaaagtatataataacgtaattgtttaagtgtagctctactagtgtttcatataacacatacttaaatcttgaatattgtctataacttcataacttgtaagtagtaatgattcatatatatatgagtagagagatagagagatttactatttgctaagaacccagcagcttccaacgaccaatatggatttgttgtcaaggtacttaagaacactaacgacctccatttctgtcgacataatttatgtttgtatatacgtttgagtgagagaaataatgcaacagagtacaactgacatatcacatatgtgttactaagatttatagttttaggctttacaaggtgaaattaatgtgagcacctacctacatttttgttttgtcccaactactttaaaatagctgtcaacaaattccataacatatacttaagttataaatttcaactctacatattctaaatatgaacgtatttaaattaaacgtggcttaacttaagtatttttgaacctaccaacgttgaaaagcgaaataaatattccaaattacaactaccgagactaattcatatatggttagatatgattcgattctgatataatggaaaacgtacatatatatatagaaagaaacacaaaacacaaaatttagatcaaaatggtatttaaacacatattaactttaaaaattgtatatttcgaagtattaacagtagaaagaatgatttttttttttgcatttggaggcaatttctgttgccacaaatgtatggttgggtgagataggatccgacagagtaaaacaataagtaatatgaggcgtccaaagatatctaattttagacttaaaaattagaccgcctaccttcttcgtttgtaacaatacttgaaatagcgctttaagtggcggtctaggcgcgccatatatacaaccgtgacaattatttgataggtgctaaataattgatggcattatgtggttttaatcgacattatacagtttacataatcattaatctgttgtcatttgactttttgttcatttcagtgtagtttttcgatttataatgacataaaattcattataagttttataacataaaaagtagatggcttctattatttgatgtcaattgaattgattttatggttatctttaagttgatttctattgaatttttgatgtagtttgaattttaaatttacttctaaaattaaaacattttaaatttacttctgtgaatcatgatattttatacgttctattatgtacataataaacgcttaattagaccatctaaactcgtttaaattccaattaaaacgttttagatgttagacattagatcaccacctatttaatgtctgcctaaccattgcttttaagtagttacttgtcatcaaatccaaagcagttgtcatcaaatccaacttacaaccatctatactagtacgactggctaaggcatgattcgaccctactcatgacaaacgcaaaacagcctagcatattaaaatcctaaaattagattatcaaagttgtagtttatgtactcgtattcgacatatagaagacagaacaaatgcggcagctgataacacttggatttttacattatgaaagtggtagattatgtacatttaaatttggatctctatttggtttggtttggtttttactataatttaagtcaattaagttttttatttaaggttaactgaaacaccctcaactaccaataaccaattaaccttaaaagattaattaaagtcaagagatagacaaaagcataataatataaacttaattttaattttgcaattaacttcggccaagctcagatggaccagaataccatcaggcctattcatgcttgggccggttaacacctccaaaatcgctagtaactcaaaagagctacaaataacggactttaaacatgatctgctacaacaatctgcagaatctcaaacactgatgcatatgaagagtgactataaaaacaagccgataaccagattttgataagtttctattttccccttttattgcgttagtgttacgcattcttcaagtgttacttttagggttagcattttggttatatataggttttcgtgctctatttaaagtaatacgttttattagtttctttataagttttgaatatgccctctttgtcatctacttcgaattattcttttgagaatttagcagctctgaaaagaaccattaagatcatttgttttgctagatatttcttggaagtttttttccccacacaaaaaaaaagcttattcaggcattgaaatttgttatactatgaaagaaaattgcaatggaagtgaagtgttgtaatttgtaaaccacgagttacataaaggcggctacaaggaaaacttgtttgtgacgaaattacaaagcaaaagagagaaaagaatcagtccagttgagatttgagaaccctttttttttttcgttctatatcagtctttttgcttaaaactccttcctatttttcacatctgggacgttaaagtttcactttaatcactgcttgaaatgatttcaagttgaatccataaaagcttcacaaatgtccaaaatagctgctgctcttcatcagtttgatcttcaccagcgaatttcaaagttaattttagtcagatttgatatattctttataaagtaagaataaacaaagtagttgaacatctacagaaataataataaaaaattactgaactggttatttagaatctggtttccatatgcaaataaccacactgctcttggaatgctgttttgtcctgcttgtttcaacacccaaagacatatatagtgagattcttgagacaagtcacgtgtactcaacagaacctaacagagagatagtgaagagagagaaacctgaaactgagtagccgagaagccttgtgagtaatccaatgtactttctggaaaggtttgctctatcttattaccaccaacacttttctgcaacatctacaagatatattaaaacgaatgttaaatcccaaaaaactaaagaacaaaacttttctattaaaaggtaaaaagaacaaaaatcatggacttctatactaggtaaattctgtatagtgacatgattatttgtttgtgtttacgtctgggtttctaatatgagctaataattataacatggaacgtaaacactatgtaaacgcaaccaaaagatagatctttgttccttgaagaacagagtggactattatcagttggttaacaaaattcgttgaaaatagaaagacttacatgagggaaattgaaaagaggagaactagcagtatcatcaagaagtgagttcattttctcataatctcttcttttcttttctctcttgcattgtttcttgagaccaacaatatttatcttcttcacagaatcttcctcagaaatattccttggaccagaagaagcatctgaaatcattgacaaatcgtcttcttcttcttcctcttcttgatgcacataattttggtcccatgaatctttgcttcttcttctgctgtcaaacccattgctgtctctaaaacaagaaggacttggtgaagaaacagactggtctaaatacagagtccatcctgactcgcatccgctacttgaccccaacatttcttcttttatgttttataagaaaagatatatattcttattgagatcgaacagctatgttgagaaagatttaaagaaagactgtgggtgaaaaatcgacttaaaacctatgttctttctctctatctaatatttatactaacacatgcatctatacccctctttctctatttcattgtttaagttatttatttcaatttttggttttatcttcaataggtacggagtataaacttattttaacttattatcatcgactcatcgctcctacttcttctgcctattaattttcaaactttaggttggtctaataatttgggcttttgttttgtcgttattagggcaaattaatatgaacgaaataaatttttacagaagatctaatggataagtcggcgttcttaggcacactcacttaagcggtctttgcaagtctgcaacatgtgaactcgatttaaattgcataataaagtctttttcttttttggttaaaattccatatatctatcttgttgccttgttggttaactcttgtcttacaatgccagtttgtaacatgggaatgacatgcagcgttcgtatctaggcatttttcatatttaatccaagttataactttttttttgtcgtaatccaagttataacttatagagccaaaatttatacttcggctacagaaaaataaattaagaacgcacatatctaactagagtaaacttaatacgtggatttctattaaatatcgttctaatagaaaagttcccacgtgacatatatattctccaaaactagtcttgaagagataattaaatacccattgatcgtatattatatgtttattattcacttattatgtatatttatactgtattagtggggataattagatggtgcatgggtcaaagcgagttccacagacaagtggtgacaagaagatccgagcggtctattgactacgcttttatgagatcacatgtcctcacatttcgttttgcattttttatttcctttcgtacactctaatttaattcttacctaaatctctcctgtcgaaaagaaaatctctctaattatttctcttttatcttccttttcgtgtatttggcactctctatatacctgggataacgagatatatattgatttcattatagcatgattaagctttgaaaagagtaataattatataaattttctttgcacaaaaaaaaaataattatataaattttctagaaaaaaacatttgacaaaaaaatctagaaaaagattgtaggttttctttcattctatatcactgggaagtaacataatgatttggttcatttttaaatataatgaagaaaactaaaccgaaacgaagggatcggaatataagatgataatatagatggatttgatatgtgagaaaatttcataaattttggaattgcttctctgatttggcacacatgctctgtaagtccaaataatttaagaaaaaaaaacaaaattgattgattttattgaaggggttgtaccgttctaatagctagaaaatcaggcatgcatgtgggcacgtgtgcacgtaaaaaagagaaatacgcaaggttcaacaaattcacacatgtgtgcacgtgcaacaacacgcatttcgaccaatttcacacttttgcaattttagactcttaaatgtgtcaccttctgatccctctcttttcaattgctgataatttctatgctttcccgatttcgatgttctcgtcctccatgtgttctattcactttttatcttcctttcatatatacatacatacatacatattggtgtgtttctttcaagaaaagatccggtaggaagaaaacacgattttataaaaaatgctttacttcgaacaaattatgtctcttttaacattaacacttcaatattagtctgtagaagatgagtacaagacgttatgattcatggtagaagacttttcaagttttatatgattattatgaatttatgaaaatatcacatatttttaaaagaattcaagcattaattacaactctaaccacctgacgctgacccatctccttagttacctccaagctgaaactggttgacatgttcttcatccatggatgacttacattcacattgtaatgtccatgcaacaatgagacctcttcttcatcattctcggaatccgtcatgaaaatcttgggaatctctgaagattgctgccactccttgagcaacttgtcaattacatctcctgttgcagtgttgttgaagtatttgtccgcaagtgtcagcttgtcgaaaccagacacctcaggcccagcaaatattatgatgcctttaaccgcaggatgcgaatacgcttccctcaaaatttcttcaatgtatacctcctatcaagcaattgaaatagttaacaaattttaatgattatgataatgaaggctttcttgttaggcaaggtaagatgctgacaaacctgattagggcacttaggcatatcaacctctgtaagccagataggcaaacctagtgagcctaaagtatccaatgcagatctcatgtaagctaagttaggctgagttggacgaaagtgaccttgagctccaatagctcctttaatgttcatgttacctgggtaagcaagaatctcctccatcttctccttcaccttaaccggcgtcgcggtaacctctacacggttctctatcgtgttgtactcgttaacgaacattgtcacatcaggatcaagcttaaaagccaaattgtagaaacttgacgaagcgttggcaccaagcattttctcaaagtaatcccaatgcacgttctcattaaccacgtcccacccggttaacttccctttgtatctcgtcataaccgagtttatccggttcaatgtcacattcatcaaatcgtttggatcttctatttttggcacccaagttggctgcattaaagggtcatcccacaacacagtatgacctctaaccaatattccattctcttccgcaaattttaacattgaatcagctgccgtgtagttctcgtgaccacgttctttctccgttgtataccatttcatttcattggtgaaggatgtgattttaaaccgcgacgcaaaccaatttctgtacccttcgctttgtaggatccggaaattcattgcgcagcctaataggaaagatggtttggtttgttctatagatatcactgcgccttttaccgcagttttgttctgataagttacttcaaatctcaccttgctcttccttatctgcaataaacataaatcatgtaatacccaaaacaactggccagaccggccttaaaaaagctagtaggtgggctggtcagaatcaggtcgggctagttcggccatggctctccgagcatggtacatattggtactcttttgtatattgtgtgatgtgattcgttgggtaaaatcaagaccgagtttaacttaaaaacattataggcctcaaatgggccaaatcaacaatgaatcgggcttaattgagccggcccataacaaaaccctaaaaggctaaaactatacagatgacagaagatcaatgctaccttttcaattagttggtcttgtttcagtttccattcttgtttactgaactgtttcagggacacatcgcttgcagaaatctttgcttctttgtcatcactctgcttccacataaaaccgtggttgacgcagtgttatatatacatataggaataaacatatatagctagttgttgtacctcgaagaaaatatctacagagcctgaaacatctggcacaatgccacctttaagcaaagtccaacatcttttctttgccctaacttcacctccatgaacaaatcttccattttctgtcctaaacacaactcctactttcttattgtttccttctctcaacttcacccaagctgtacttccattaacaaagaaactatggatggtcaatgaaacgattatgtattacactgaaatcagactgaacacaactatcaagattcaagaatctctggtttgaaacagtaacttactagacaagaaaccatgaaacgatgatgaattatatttattatatataaactagagagtgggttgcatgcatgtggtacatataaattaccagagaagctgtaaatgtttccttcgtgaagctgaattctctgtgtcatttctcttatggatccacttccatctattttccattcttcatcagagtcatcttcgacagagcggctaaattgtaataatcctttcgtttcactgcttcgtggaggcttcattacacacttcattcgtatataccagaatttaccaatgttagaatgtttgaatttaattacataaatatataaaaaatcacttctatttagtatttattgaggtttatcagttttggttacctctgttttgagtgagtcgcttggggagaaaggatcaattgaaatccccgaatgcacaaaacaccagaggagtaaaagcatgcagaggaagaagccattgttgatgttcttcatgatccttccagtaaaaactgaaatatccctacaaaacccaatctatgaaagctttggggttgttagattctactctgttattataccgaataggctttatattgtagataactatgtcttattttcctattaaaaatgactacaaattccacaattcgaaacaaatatgtaagaactaactacatatatagactagtacggtaaacttaaaactagaacaagaagtaaacacgtacgaaatatacctttttacccctaaattgtgtattaactaccaagtgtgttggagatacgaatcccgcatctttagtgattattgtgatatttattgttagtatttgacaatcttttattttagaaaattagatatgatcttcagcatatacatgtatgtctcgacactatgatgaaataatccagttatttagaaattttctcaactcttttcctctgttattttacaacgtgggtactaatccaataaaagtacctaaagtatgattcactcgtaatagttaaagaggttatatatgtattttgaaatgaaacgcttggaagcaaatattttgtttggttggagtaaaagcgaccaagaagcaaaagtataccatagccgttaagcaatatatcgacaggtttcgtcctctacgttagagcataaccctcgcgtgccaaggtgacaagccgtgggccgaccgctagcccagggaccatttgctattcacttttttaaaattataattttgtaagtcatttaagagataccaatggatggtaacaatattttttgcttttgatgataccaatgcattatgcagaacgaaatgcaacatactattgccaacattgtctggctggttaactcgatagtgggtgtggttggaatacgaaagatgatgcttatacatacacaaattcatatatattgagatgtttttttcatttgacccaaaaaaaaaaaagagatgtatcattaaattttcttatatgacgaaatacttcgatatatttttctcaagaagttgaccatacagtttttttttttaatagtttaatagtaggcaaacttttcttcctttaagaagccgttttgatttatggattacagtagatgacttttcaagtcttatttgagtatgataatctcacttttttttttttttttttttttttttgtaatttcaagcactaattacgactctaatcacctggtcttgatccatctccttagttacctccaagctgaaactggtggataggtttgctatccatggatggcttacattcacattataatgtccatgcaacaatgagacctcttcctcttcattatcagaatctgctgtgaaattcgtttgaatctctgaagatttttgttgccactccttgagcaacttatcaattacatctcccgtttgtgtgttgttgaagtctttgtctgcaagtgtcagcttgtcaaaaccagacacctcaggtccaccaaatattatgatacctttcaccgcaggatgcgagtaagctt

SEQ ID NO: 664 - DNA, 86748 bp, Arabidopsis thaliana
gaattctctgtgtcatttctcttatggatccacttccatctattttccattcttcatcagagtcatcttcgacagagcggctaaattgtaataatcctttcgtttcactgcttcgtggaggcttcattacacacttcattcgtatataccagaatttaccaatgttagaatgtttgaatttaattacataaatatataaaaaatcacttctatttagtatttattgaggtttatcagttttggttacctctgttttgagtgagtcgcttggggagaaaggatcaattgaaatccccgaatgcacaaaacaccagaggagtaaaagcatgcagaggaagaagccattgttgatgttcttcatgatccttccagtaaaaactgaaatatccctacaaaacccaatctatgaaagctttggggttgttagattctactctgttattataccgaataggctttatattgtagataactatgtcttattttcctattaaaaatgactacaaattccacaattcgaaacaaatatgtaagaactaactacatatatagactagtacggtaaacttaaaactagaacaagaagtaaacacgtacgaaatatacctttttacccctaaattgtgtattaactaccaagtgtgttggagatacgaatcccgcatctttagtgattattgtgatatttattgttagtatttgacaatcttttattttagaaaattagatatgatcttcagcatatacatgtatgtctcgacactatgatgaaataatccagttatttagaaattttctcaactcttttcctctgttattttacaacgtgggtactaatccaataaaagtacctaaagtatgattcactcgtaatagttaaagaggttatatatgtattttgaaatgaaacgcttggaagcaaatattttgtttggttggagtaaaagcgaccaagaagcaaaagtataccatagccgttaagcaatatatcgacaggtttcgtcctctacgttagagcataaccctcgcgtgccaaggtgacaagccgtgggccgaccgctagcccagggaccatttgctattcacttttttaaaattataattttgtaagtcatttaagagataccaatggatggtaacaatattttttgcttttgatgataccaatgcattatgcagaacgaaatgcaacatactattgccaacattgtctggctggttaactcgatagtgggtgtggttggaatacgaaagatgatgcttatacatacacaaattcatatatattgagatgtttttttcatttgacccaaaaaaaaaaaagagatgtatcattaaattttcttatatgacgaaatacttcgatatatttttctcaagaagttgaccatacagtttttttttttaatagtttaatagtaggcaaacttttcttcctttaagaagccgttttgatttatggattacagtagatgacttttcaagtcttatttgagtatgataatctcacttttttttttttttttttttttttttgtaatttcaagcactaattacgactctaatcacctggtcttgatccatctccttagttacctccaagctgaaactggtggataggtttgctatccatggatggcttacattcacattataatgtccatgcaacaatgagacctcttcctcttcattatcagaatctgctgtgaaattcgtttgaatctctgaagatttttgttgccactccttgagcaacttatcaattacatctcccgtttgtgtgttgttgaagtctttgtctgcaagtgtcagcttgtcaaaaccagacacctcaggtccaccaaatattatgatacctttcaccgcaggatgcgagtaagcttccctgagaatgtcttccacgtattgcgcctatggagcaatcgaattagtcaaccaattttatgtttatgataacgaataaaaagactttcttgttagccaaggtagttgatgacagacctgattagggcatttaggcatatcaacctctgtaagccaaataggcaaacctagtgagcctaaagtatccaatgcagatcttatgtaagctaagttaggctgagttggaccaaagtgaccctgagctccaattgctcctttcatgttcttgtttcctggataggcgagaatttcctccatcatcttcttcacctttatcggcgtcgcagtaaactctttagtgttttctatcgtattgtactcgttaacaaacaatctcacatcaggatcaatcttaaaagccagattgtagaaacttgtcgaagcgtttgcaccaagcattttctcaaagtaatcccaatgcagattctcgttaaccacatcccacccggttaacttccctttgtatctcttcataaccgagttgatcctgttcaatgtcacgttcatcacatcgttcggatcttttatatttttcacccaactaggctgcatttttgggttgtcccataacactgtatgacctctaaccaatatcccattatcttccgcaaatttcagcattgaatcggctaccgtgtagttctcttgacctcgtgctttctccgttgcataccatttcatttcattagtgaatgaagtgattttgaaccgcgacgcaaaccattttctgtacccttggctttgtaggatccggaaattcattccacagcctaagagaaaagatgatttggtttgttttagtgatatcactacgccttttactgcggttttgttctcataagttacttcaaatctcactttgctcttccttatctgcacacatatagatataagaaaataaggctcaaggcaaccaaagcattttatatggattcattcatcagaatatgagatacatgtaaattttatatgtagagatcatttctaccttttcaataagttggtcctgtttcagtttccattcttctttgctaaactgttttagcaacacattgtgtgcagagatctttgctcctctgttttcactctgttttcgcattaaaaccacattaacacagagaatatacgtatgtatctaaacatgtgagtacacatttacagtgttgtacctcgaagaatatatctacagggcctgaaaaatctggtacaatgccacctttaagcaaagtccaacattcttgatttgccctaacttcacctccatgaacaagtcttccattttctgtcctgaacacaactcctactttcttgtcgtttccttctctcaatttcacccaagctgtattttccattaacaaagatgtatgttcaatattctagtcctagataaacataaccgacctgaacttaaaccaaactgaaattatcattaaattggtttaaatgattttacttatttccatgtcctgaatcaagaaccgaaccaaatttcattatcgttgaaattcattcgagttgatagaaactaaattcaaacggtaccaaaccaatctagattagattcgacttgattttttatttatttttattttgtgtaatatactttctaaaccaaaaaaaactggaaaaaacaattctacactgaaaaatactgaaaccatgaaatgatgatgatgcattattgtataaactagagaatgggttgcatgcatgtggtacatatagttaccagagaagctgtaaatatttccttggtgaagctgaattctctgtgccatttctctaatgaatccatttccatcaattttccattcttcatcagagtcatcttcgagagagcggctaaattgtaataatcctttcgtttcactgcttcgtggaggcttcatcacacacttcattcgtatataccagaatttaccaatgttagaaagtctgaatttataaatctataaaaaaatcatttttgtgatatatctattttattgaggttttatcagttttgatatacctctgtgttgagagagtggctatgggagaaaggatcgatggaaacccctgaatccacatggcaccagagaagaaaaatcatgcagaggaagaagccattcttgatgctgttcatcttcctttcagttaaaactgaaatatcccaacaaaacttattatataaagctgaaatatcccaaaaaaaaaaaaacttattatataaagctttaggtacttgtcagattctactgtattcttatactgaaaataggctttatacttaatacaaatattttcttttcctatgggaaacgactataaaatacacaattgccaagaactacatagacttcaatacggtcaatataaatcgtacacctaccattcaagttacaacaatatcctaaaatatttttaaaagaccaaaaaaaaaaatggattatagtcactttttaccaaatgatagatatgtagattctgctgattatttattcattaaaaaggagatgtttcatctaatatgaagaaataaaatttcccaacaattcttcaacaatgcttgaccaatgaccacaaatcagttagtctttattttgtcatctaatacattaaattgtttgctaaataaattattattttaatgtctaaacttttcataatgcttatatgtaagtggtttgattagtttccaaaacatacgcatttgatcaacctccctgcgagtttgacaattaatgttgggtcaatattatcaaaaaaagctagagaacgttcaatattattgataataaatccattagtatatattaaggaaaccaacccaaagatgctcacgaaagttacctctcacacaagtataattcaaaacagactatatatctgccacaacttttcactaagaatcagactactcatatacataaagtagttgtaaacttagcgcctcaaacacgaaagacaaaagttgatggttgggtatgtaaagaggagtcatcagaagtcaacgtaaagttgtgtgaaacgcttgaattggtgagaggatgagaaatattgagatcatagtcaccatgaaagagtgaagcttcaaagaatccatcagcatcggtgacttcagtagtttggctgcgtagccctccccattcacgtataagcttgtccacaacatctccagttggtagattcttgaagtttccatcggtgaggcacatgtggtagcaatttggtgcataagctgtccacgtcaccattcctttcacatgcggatgcgcatgtccctctcttaggacttgctcaaaatacttggcctgcaagaaatgaatattagactcgttccaagtgctcaaaacctcaagaatatatatatttatatggatgaaaaaaagagaattcgagaccagatattgtgggaaaaagatggacctgagatttttatagcctacttttataaaagaatatgaattacctgatcactggaaggagctttaacgtcgatctcagtgagccaaataggcaaaccagtggcaccaagagtatcaagagctgatctcatatacggaatgttaggagtgctgaaatgagactcaagaccgatccccaatggaatgtttccgcgaacccgaatagattgaagctccctaagcttctccaaatacttcgctggactcgctttcagatctgtagggtcctctaatgtatagaattcattcataaacattgttgtgcttggatcaatggcatgtgccatcgcgaagatgttattagaggcgttaggaccaaacttgctctcaaagaaggagtgatggagattctcattcacaacatcccaaccggcaagctggcctttgtatcgcgagaccaccgagaaaacccttcgttttactgcattgtatagatcgttacgtgacagagaagtaacccatttagattgatacttagggtggtcccatacaacattgtgtccacgtacagcaatgccatgctggttgaagaatctcaacattgcgtccgcgactgtgtaattctctatgcctcttacagattctgtgctgtaccatttcatctcgttttcgaatgtagtcacggtgaatctttgagtgaaccagttttggtatgcttgattcccaagtatgttctgtgctacagcgctcccgaatgggaatccgagtcgcttctgttctatggtaatggatgcgtttggtatcttctcgcctttgttattgacgactctgattctgacaggaccttttcttgaattgtcaatgctctgctcctggtgagcgttccattcgtcttgtgtgaatggttgcaaagagacactatcaacccaaatctcaactgttgtgtcctcgctctacacatgaacaatgaaatatgaatcatcatatatatgttgagaaagagcagcttgcaaaatgcagacatgtagacaaacaatggagaaaatgcgtatgtttgtgtatagatatacctcgacgaagagttcagcaggaccagattcatcaacagtgaggccacctttcagcatggaccaacatttggattcagcaacaaccgaaccggcatgcttatattcaccattcttcttgaaaacggcactcacaggagcttttcctgtgcttacttgtaaccaagctacaagtataacataaaatacatcagatgatagttttagagagtgtgctccaagaaacaaaaacacggaattatttttaccagagaatgtgtagagaattcctttttccaagtaaaccttctgtgagacgctgtcagaagattgatttctctgtgtggcaacaacaaacttattgcctccaaattctctgaaattgacttttgcattttcgaactgtgaccagccttgggaaccattttgcatatcaggattcacgatgatccctccattgtactgtggtttataaggaatctctagacactgcaccaagacaaaaagagaatcagaacaaagtttccaacgaacatgtctgaatgaacagagcattgcttgcctctattgttgccgagtagtcataagggacgagaatttcttcacaccctgcaaacattttcatagaaaaatattggagaaactctttttttcccattgataactacgtaataaaaaattcaaaaggggtttcctttgaaaaacatgaaatgcgagagaaaaaataataatcatataggacattttagataacgacaagagtatagctatagtaaaatcaaagaataagatggagaataacttgatagagaaagacagcagaaagcaagaggcagcagtagtagaagcttcattgcagaactaaagaatcacttatttttagtgatgattaatgttttccaataatatatactttttatggtcttggtatatttatttcattaacaaaaaagtatcttgactataatttatttttgggaaagttttaccatatttgttttcagaaaaaaagaagatattaacctccgtttacatctgcatattaactcttgggaaaatctcattttttgcgcggaggccaaatatggaaagaaaatgccatcaatagcttaaattctagtcaatagtcaacagatacgtttggtcagagttaaaacaaaaaaaggcaacactataatttttttgtatcaccttaaatattattttgtttatcttttaattgactttttttattacttttgtaaacgattttattttatattgtaaaattatatagaagatggctgtttccattgatattccggcgtacaccacataaaaaatctgatggaatcttacattttctacgaatttggccaaacttcctgcgttttgacagtaaatattggtcaaaactacaagtttgtattgaaatatttccctaatatgttctccctgggtgttttttttaggaaaaatgatgttttatacaatgtatattttttgttaaaggattaattaatatcttcattttatagaattgtttttatataatgcaagtatattccacaatagcaaaaatcaataaacaaatgaatgatatatgaattagctttggaaaaatgaataattttactattttaattaactcgaataaagaaaatgtaatgattcaagagctcaaaatacttgacgaaatagttaaaggaagttcaatatcattgataattttattacaatatcacggcttaattaaagtataagaaaccaacccaacgatgctcatggatatcccatgggagtttcctcacacaaagttataatggaaaacacactaatctgccaataagaatcaaactactcaaatacaaagtagttgtaaacttagcttctcaaacacgaaagacatatagagatggttgtttctgtgaggagtcgtcatcggaagtcaacgtaaagttgtaagaagcctttgaattggtgagaggatgggatatacggagatcatagtcaccatgaaagagtggagcttcaaataacccattagcatcagtgacacctgtggtttggctgcgaagccctccccattcacgtaaaagcttgtccacgacgtctccagtgggtaggttcttaaagtttccatcggtgaggcacattcggtagcaacctgatggagaataacctgtccacatcaccattccattcactttcggatgtgcatggccttcccttagaacttgctcgaaatagttggcctgcaagaaaaacaaaacatcagagaaggaaatgaaaattctgaaatgatgatttttttcctacttgtataagagaataattaagttacccggacattgggaggcgcatcaacgtcaatctcagtgagccaaataggcaaaccagtggcaccaaaagtatcaagagctgatctcatatacggaatgttaggagtgctgaaatgagactcaagacctatcgctaacggaatctttccggcaacccgaatagattgaagctccctaagctttcccaaataccttgctggactagaagttaaatccttaggttgctctaacgtattatattcattcatgaacattggtgtccttggatcgacggcatgggccattgtgtaggtgttataagaggctttaggaccgaacttgctctcaaagaaggagaaatgaagattctcattcacaacatcccaacccaaaagctgtcctttgtatcgcgagacaaccgagtaaacccttcgtttcacagcgttgtagaggtcgttaccagacagagaattcacccatccaggttggtacttaggatcatcccataaaacattgtgcccacgtacagcaatcccgtggctcttgaagaaacttaacatcgcgtcagctgtcgagtaatcctcttgccctcttattctttctgtgctgtaccatttcatctcgttcccgaaagttgtcacggtaaatctttgagtgaaccagttttggtatgcttgattcccaagtatgttgttttctaccgcgcacccgaatgggtatccgagtttcttctgttctatggatatggttgcattaggtatcgtctcgcctttgttattcatgactctgattctcacggtaccttttcttactttgccaatgctctgttcgtggtgagagttccactcttcttgtgtgaaaggttgcaaagagacgctatcaacccaaatctcaaccattgtgttctcgctctacacatgaaaaagggataatggatcaccatatataggtgtataaagtagcttgcaaaatgcagaaatgtagacaaacaatggagacaatgagtatgtttgtgtacagagatatacctcgaagaagagttcagcaggaccagattcatcaacagtgagaccacctttcagcatggaccaacatttggattcagcaacaaccgaaccggcatgcttatattcaccattcttcttgaaaacagcgctcacgggagattttcctatgctcacttgtaaccaagctacaagtataacataaaatacatcagatgaagttataaagagtgcgcttcaagaaacacaaattcaaaattgtttttaccagagaaagtgtagagaattcctttttccaagtacaccttctgcgagatgctgtcagaagattgattcctttgtgtggcaacaacaaacttattgcctccaaattctctgaaatcgactttggcgtttccaaactgtgaccagccttgtgaaccattttgcaagtcaggattcacgatgatccctccattgtactgtggtttataagggttctctagacactgcaccaagacaaaaaatgtaatcagaatttcaaatgaccatgtcttaatgaacattaaaaaaaaaaaaaaaaaaaatgtctgaacgaacagagcattgcttacctctattgttgccgagtaatcataagggacggattgttcttcacaccctgaaaagtgtaaacgtttacacgtaaaaaaaaaaacattagaatttcttttccccggcccgttgaaaatataacagagaaaaagattcaaaaagttttcttgtggactaacagaaaaagataaattatggggaaaataactagaaccttttctcaagacactttaacatatgaacaagaatatagtaaaataaaatcattttagacaaaaaaaaaatcgtttatcaaaagaagaagaaaaaaaaagaaagtaaaatcataggataagatggagaacaacttgatagagatagacagcagaaggcaagcagcaacagtagaagcttcattgcaggatttttttttttttttttttattgtggtaaacaagaatcacaagttttgctgatgattaaggggtttctgatatatattgtacatttttaggtaacaattaacaaaataaataaatattgactatacttttatgaaacttttaccacacgttttttttttttcttccaccacactttgtcttcaaacaagaaattgtcacacgtgttcattatccgttaacagaaaaagcagcatatcaaatctaggaaaaactctcaaataatatcctttattgcacggaggccaaatatggaaagcaaatgtagtcaatagtcaatagatatgtctgttcaaacttcaaatataatgcaagtaaataaaatacgtaaatcatatcctaaaattttcaaaaaacctaaatgttacccaaatattgcttccattaatattccggtttcaaccacacaaaaaaattcgtatggtcgaacttccagcaaatttgacataaatattgggtcaaaaatataagttatttcgctccattaatatttttctgtttctttgtttgttttgatgaaaattgatgttatactatgtcagcacaccttaataataaaaataataaaattaaatgaatgatattttatttttattttggtcggaactaaatgaatgatatttgaaatagctttagaaaagtacaaaaattaatctcaagcaaagtttaactaaagaaaatttaaatgattcaatagctccatttccaaagattcaacgaaatagttaagaggaagttcatttttttttttaattagaggaagttcactattatgatcattctattacaatatcaaagcttaaagacttaaactataaaaaccaacctaacgatctcatggtcatggataggatatcccatgggagtttcttcacactgtctgctgccactaagagtcaaactactcaaatacaaagtagttataaacttatcgtctcaaacacgaaagacaaaaagagatggttgggtctgtgaggaggagtcatcagaaatcaacttaaggcattgagaaacgcttgaattagtgagaggatgagaaatattgagatcatagtcaccatgaaaaagtgaagcttcatagaacccattagcatcagttacacctgttgtttggctgcgaagtcctccccattcacgtagcaacatgtccacacatctccagtgggtaggtttctgaagtttccatcggtgaggcacattcggtagcaacctgatggtgaataacctccccacacaaccattcctttcacctgcggatgcgcatggccatcccttagaacttgctcgaagtacttggcctacaagaaactcaaacattagacaagttacaaatgctcaaaactccaaatcaatagggttggataaacgggaattcgaaaattgtgacttttgccctacttgtataagaggatatgaattacctggacactgggaggagcttcaacgtcaatctcagttagccaaataagcaaaccggtggcagcaagaatatcaagagctgatctcatgtacggaatgttaggagtcttgaaatgagactcaagaccaatcgctaaccgaatatacccggaaatccgaatagattgaagctccttaagcatttgtaaataccttgctggagtagaaactggatccctaggttcctctaatgtattgaattcatttataaacagtgttgcccttggatcgatggcatgcgttatctcctagatgtcataagaagctttaggacccatcttgttctcaaagaaggagaaatggagattctcattcacaacgtcccaacccgcaagctggcctttatatcgcgagaccaccgagaaaacccttcgttttacagcgttgtagaggtcgttaccagacagagaattcacccatccaggttgatacttaggatcatcccataaaacattgtggccacgtacagcaaccccatgctgcttgaagaatcgcaacatcgcgtcagccgttgagtaatcctctttgcctcttacaacttctgtgctgtaccatttcatttcgtttgcaaaagtcgtcactgtgaacctttgagtgaaccagttttcgtatgcttgattcccaagtatgttcttttctacttcgcacccgaatgggaatcctagtcttttttgttggatggaaattgttgcatttggtattggctggccttcgctgtcaacggctctgatcctcacggctccttttctcgccttgtaaatgctctgctcttggtgaaagttccactctttttgtgtgaatggttgcaacgagacgctatccacccaaatttcaaccattgtgtcatcgctctacacatgaccagggaaataagaattgtcataggtaaaatttaaagcagcttgcaaaattcataaacgcagacaaacaatggagaggaggaccaggagtatgtttgtgtataaacatacctcgaagtagagttcagcaggaccagattcatcaacagtgagaccacctttgagcatagaccaacatttggattcagcaacaaccgaaccggcattcttatattcaccgttcttcttgaaaatagctctcacaggagcttttccttcgcttacttgtaaccaagctacaagaatagtaataaaaaaatcaaatgaattctgaagagtatgctccaagaaacacgaaattatgtttaccagagaaagtgtagagaagttccttttccaaataaactgtttgtgagacgctgtcaaaagattgattcctctgtctggcaacaacatagtgattgtcaccaaattctctgaattcgactttggcgtttccgaattttgaccagccttgtgaaccattttgtagctcaggattcacgatgattcctccattgtactgtggtttataagggttctctaaacactacaccaacaaaataaaaaaaattaataagaacaagatcactttccaacgaacatgtatgaagaaagactaataaacagagaattgcttgcctctattgttgccgagtaatcataaggtacgaacgtttcttcacaccctagaatcgttgtcatacaaaaattaattcacttttttcattggtaataacagctagattcaaaagttgttttcgcattagttacaatcagaaaatatatatatggcaaagaaaatcagaacttgagattcaaaaagaatgaaaatcataactttatagtagatttaacataataacaagaatatcgtaagataagatggagaacaacttgatagacagagaccgcagatggcaagaagaagaagcagaagtagcttcattgcggaactaaacaaattgtgttgctgatgatgattataaggatctccaatatattctacttatatattatggtctagatatgtttaattaacaaacaaaatcttcaacatagtttactttactttatgaaattttagcatcatggttttggaaaattagtcaattaatatatcgtccattaaccgttaatagaaacagcattactagatctaggaaagtttgcaacgactatcctttttgcgcgggggccaaatatgtaaaccctaaatccacaaaaattctcaaatccgcaaaaaccctagtaaagatttagcacttaagcaaatgaaacttgaatatttacctccaagcttgttgatactttatgcttctctccgaaaccacaacagatcgcgatagttgagagaagtaacctaatgaacttagcaacacctctagttgaagcttccgagaattcataaatcgatcgacattccaaagtagttagagaaagttaaattcaatgttattgataaaagtcattacaatacagaggcttaaacatttgagaacccaacaaattggtgctcatgataaagcctttggtggtttccagagatacggctataaatatgtaccatgtctagaataataacaaaacagactatttgccaccattcttgactaaagaatcaaactagctagctcaattataaagtagttttatacttggcttcttaaacacgaaagacaaaagaagatggttgattctgtgaggaagagacatcagaagtcagcttaaagctgtgagaagcttttgaattggtgagaggatgagcaatcttgagatcgtagtcaccatggaagagagaagcttcaaagtatccatcagcatcagtgacacctgtggtttgtctgcggaagcctccccattcatggagaagtttgtccacaacgtcaccagtgggtacgttcttgaagtttccatcggttaggcacattcggtagcaacctgatggagaataacctgaccacgtcactattcctttcacttgcggatgtgcgtggccttcccttaggacctgctcaaaatacttggcctgcaagaaaactcaacattagacatatagataagaagtgctcataagaaccagaacagtagccggtggaggatatgaattacttggacatttggaggagcttcgacgtcaacctcagtaagccatataggcaaaccagtagcggcaagagtgtcaagagctgatctcatgtacggaatgttaggagtcttgaaatgagactcgagaccgatccctagagatatgttaccacaaactcggatagatctaatctccctaagcttctgtaaataccttgctagactagaatctgaatcgcttgattcctctaacgtattgtattcattcataaacatggttgtcgtaggatcaaaagcttgcgccatcttaaagatgttatatgaggctttaggacccatcttgtcctcaaagtaggagaaatggagattctcattcacaacgtcccaacccgcaagctggcctttgtatcgtgagaccaccgagaaaacccttcgtttcacagcgttgtagaggtcgttaccagacagagcattcacccatttaggttggtacttaggatcattccataaaatattgtggccacgtacagcaaccccatgctgcttgaagaatcgcaacatcgcgtcagccgttgaatagtcctctttgcctcttacaacttctgtgctgtaccatttcatctcgttcgcgaaagttgtcactgtaaatctttgagtgaaccagttttggtatgctttgttcccaagaatgttcttttctacctcgcacccgaatgggaatccgagtttcctctgttcaatggaaatggttgctttcggtattggctcgcctttgctgttcacggctctgattctcacggttctctttctctccttctgaatgctttgttcatggtgagagttccactcttcttgcgtgaatggttgcaacgagacgctatcaacccaaatctcaacagttgtgtcttcactctacacatgaacaatgaaacaggactaagcatggctgaaaaataaattcacggaacgcagaaactggcaacaattcacagaaaaatatacctcaaaatagagttcggcaggaccagattcatcaacagtgagaccacccttaagcatggaccagcatttggattcagcaacaaccgaaccagcaagcttatattcaccattcttcttgaaaactgctttcacaggagcctttcctttacttacttgtaaccaagctacgaggaacacaaaatacatcagattagaattggaacaaaatcttaaagagtgtggtgcaaggaacacaatcagaattatttttaccagagaaagtgtagagaagtcccttttccaaataaaccttctgtgagacactatcaaaaggttgtttcctgtctcgtgcaacaaaaaaattatggtttccaatttttctgaaatcgactttcgcgtttccgaatggtgtccagcctagggtgccatctcgtacgtcagggctgacgatgattcctccattgtactgtggttttaaaggtatctctagacactgcaccaaaacaaacagagtaattataacaacaagaattacaacgaacattctctaaggtcaggtaaatagacagagcaattgctacctcgatggttgcagaataatcatacggcacgacttttgattcacaccctgcaaatgttttcagacaaaaacattatatatactcttttttccttcaaacaaaagtgagaaaacattaacgagaatgaagaacaacttgatagagaaaggctgcagaggacaacaagcagcagcaaacgcttcattgtggaatcaaaagaagaaaccgatgatgatgaaggagatgtaaattccttcgtatatcttgttgtatgaattttccagtgataaatagtggaaatctttactattcttgataatcgcgatgtattaattgaactaaaagaagtttttacttttagacgttaaaaaataaactttactattcttgatatgtatattaactattatgaacttgttaccatcgtagttttggaaaacaaaattcaagatataaccataactatagatagaagcatattaaccttcagaacaaaacttctcacaactatcatccttttacagatgcaagatataagaaacaaatacacaaacatagtaagaaaaaaataatagtacttaaaacgataaagctcccaaaagaaatacacactaaccaatctaacaggtaacagcaaaaccaaagctattgtttgacattatgaagataaaaaaaaaatacaaaacacaaaaccataaaatagcgatgtctatcataattagtaatcgtcatgctttgacataatttcatcaataaaaaggagtgcgccttatttgagatacaaaaattggaaaaagtagtctcttattttttatataaaatgaaattatatctgtgtgctttaagcattgaatatattgttaacgtaaaataaagatgacaaaatcaaaataggaaatatccaattcatttagtacatatactaagaaaacctagaagtacacgctactgatgaaagttaacataatttcaagcatgcataagaagatataaagagaccaccaattcgatagaatctgtagtggccaaatactgtaagaaacatatcattcatctaccacttccaggtgagttttaacaattttcagttacattcaatagggatttcttctaatcaattaagcaaatatatctgataaacttataagcaatagtagaacaaagtaacttgtagattcaacagcacaaaaacataatcaaattagttcaatgtcgataaatcgattacaagttcaacgcaaagtttaaaactcaaaagacatgatgctcctgtgtgaacaacatcgatcatcaacggtactgcaaagaaaagggcaaaacaaaaccagagcaatgaataatctatccaagagcttgaaaaaatggcaatgaagactgataaatcataaaagtatttaccttaatgaatccgatttccttggcgttgctacggaaacactgtctgcagcagttgagaccatacttcctgattagcccatgggagtttccacacacacggctacaaaacaaatacatgaatgtttaagatgctccaaatcaacacaactattaacagtaatccatatatttattcacaaaacaatgttttaacgtaaactaaagtaaaaaatggaatgaagaaatctaacaagtcaactcaaacagagcggaggaacatatcaattttctatcccatggaaactattaagattaatacaagatcttcatggataaagtgttctgctttacacacctaaaccaccacacttaactatccctaagcaaaatttcacatcaaaagtttcacataatcaataaggatcaggttcagataaaaaatcttcctatgttgaaaatctttcgaatgataaacatgataaaagttcttaggcaatcccaatttctctaaactaaacagaatttttattttaaaagaaaagaaagccgagagatgagaaaaagatagtaccataagcgagaaccaggaccgtatttcttaggatgagaattccagacgttggagtgacccatgattgtcgactgctctctgctaacagctcaaagcgattagatcaagaagacgaaatatgtgcggctcgagagagagagctatataaccaaatttgtaaaccctagttatttgtggtcttcaaatatatatgggccttatatatatgggcctaaacacaagtagactagcccattctcaacactaactctgccacatcttccttatattattgaacgttatataccaagcttgtcatttttctacctaatttaacactaactcatacgtttaagcatgcctaccattttctgccgtcaataatataacagagcctgcccttttttggcacaaaccaaagtgacattttcctatcaaaatttgataaatgaggtcagagccaaaaaatgtagtagaaaaattggtgatggttatcatacacaatgagggattgaactctcaacttatttatcagccttctgaaatcaaactcaaaatcctcaattcagttactacatatattcgaaaacaaaatcaaatcttatcaacaggagtccgctaaagtggtaaaagagagatcagttcctggggagggcctttgagcagcttgttctcacttgtcctagaggaccagtcaagacattatagcttgaaagtttcatcattgacatagcaaattctctgcggaacaacaacggatcagaagcatatgccctcacccacatctcagtcacttcactacccattagttgctggtcagaagacatcaaccctttattctgcattagtcttcggaagtatcgtgttccaaaattttcatcacctccttcattgttgtagctcaagtcgatcacttcatcattcctgtttcctgagctcataccgtagctgttttcggaatctgatgcaggtaaggacggtggtaaaccaatgtcagggggagcagatggagatgaagtcgagacagagaaggggcatttcgttttcagttcttggaggaaccctggattgagttcaggatcaggcttcccggttgctgagaagttgtagaggcggttcttaaaaaatgtgcaatgcgtgatgccaatgctgtgtgctcctgcattaagatcattcagaagaaaagaatcatgtcacaaagagagccactcccaagaagtgatataccccaatacggagaagatttagctaaacaaagagagatgctgacatctaaaagtgagaaattaccgaataagctgacggtttctctctcgttgaatcctctgaaagaaaaacgttgaagaatcaccgacagagtagcgtctggtgcaggaagctcgtgttctgcaaaatccctgtaggctgctgcactatccttccttccagtttctaggggatagaatggaccaccagcctgatagtttcaaagacatgatcaagcgttgcagcactattaacatgcacaaaccagaagagagagtgagagaggggaaatttacaactaggacggcttctctagctgccaatacaagtaggtcagcacaggaaacaactccgggacagacattctctagctcagacttaacggcgtcaatcacatcaaaccctttcaaggataggtttggagatgcatctttctcagaagtatgtgcttcatctgcgtctagaaggactgatgcatcacatccctgcagcaaaaacacagttccccaaatagcatcatgagcaaactacaagaagtgctaaagaaaacatagaatttgatattaaaaactgagcaaatctgaggatcaaacaaataacttgtgcatatccgtatttgattcacaaagtatgctaataacatcaaatctgagtatcaaacacatgagttctgcatatccgtagccaagattgagagattcacacttaaaaatctactgaccaagcataattacactaacagagatgaattcaaatccgatacagagacatcacaatcaaacattcccgaaacaagatcccaaacaatcttccatagatctagcttagcgaaatcaaaattacaagaaagggaaagccagaaatcagaaaatctgacctcgatgaagcaatcgtgaaagaggagacggataataggcggagctacgctgggtgtgacattgtagatatctctgatagctttcgcgatgattttctcggcggtagggcaagattcacggtagtaatcgtagtggaggtaagatcgatcgatatcttcagcgattgacatgtacatgaattcgtcgtcgaagggagatttctcggaaaccttaactccggtacgagttcccggtgaatcgtacgcgaaacgaaattcgacgttaatcgcgaagtagatgctgagagcgataacggagcaagtaagtaaagcgaacttgtagtctccgaggaacctcatcctcttctcttcttctctccttcttctgatctagttcgtctgggattgtaatttgttaacactcgagaagtgagaaattggagatgatgaaagaagcgggaaatctaaacgaaattaccaatttgcccttgctcctcaattagtcggttcggcaatttgttacagacggttaagttgtttcgtatatttttttggttacagatatttttttcccaaataaagagttatatttttttaataacaaagcaacaaaaaaaagtactagttaatattagaggttttttttttaatttttttgtttaagtacaatcactttcacctttagtctataggatcagtcaaaacatttctagaatttcacgagcttatgattcaacaattgaaccaaacgatgaagggtctagattctagaaatcaaaagagaaaattggttaaagcattatagtcatgaaggtgatcacatatagtttgtaactttgtattgatgatgttaatctttggtgtacttgtctcctacatcacgattggagtatactgtgaactagttggttggtccaataaaagttttaaacacacaactaaaagaaaaaaagtattaagaaaaagtagtgtatatataatttgtttcttatgaatttggaaggttttgacaataaaaaataaaaaaaattggaaggtttttttattagctgtcatttcgataaataatgttgattgattcttgtaattataaattatatcgaattgagtatattttagtgaaaacttatacttgagcgtatttattccaaagttttaattatataaagagaaacaatatgagaaaggtacaaagggagaaacagtcgccgtttatgggctttggcgcaaacagactacgaaattctaaaaactctttaaagtattataatgaactaatctttaagtattgtcttgttaaatatctttaaaaattgtttattttaattttcttatataataaaactgtagtatatgagaaaaattatatgacttgttcctaatttgtaatgttatattaattgtaaaacaaattcaagttattcaataattaacattttctgtagctgttaacatcaaaaaaaaaaacttcaaccatacaaatatattcatgaaccggttgacaaaataaaaataataattccatgaacgtaagtcaacccgtaatttaagaagtgaccagaagccaaagtcaaattctactttgaaaactatcacggcaattttacaatatttttatatacaattttgcattaagcattttttttatctatcaatctatgtccttgaactagactacctattataatatagctgaacttttattttaaattcattaaaaatttctagtaatataaaaaataatggtgttacaaaacaaattaagatcataaaatagatagtgatacaactagaaaggacaaaaaaaatggtaagatatgatagtacaatagaaaaattaacatttaaaataaattatctaaaaaaaacactcgttgaaacttgaaactttcaagttgaaagtattgtccatagtttttggttactatatactatggtaggcaaaaagaatggtacttaattctatatatgttttgtactgattacatgtactatttgatcgatcgattaggcactaagcaatgcaacttttatcaccctctctatgagacacatttagaagtagtacagtttttttcgttttatttgttgtttttgatgggtttttcaataaattctaagactgaaatactataaaattagatattcattagatttcaatgctataagggtttcataattgctattaaaattggccgttcaaaatatagataaagttgtagaacagtagttgtaatttttttcttcgcaacagtagttttaatttgtcataaatccatcaattaagcagaaataaaaaatcaaatatctgatattgattgccatgaatatgattgattgcgataatattttagtggggaaataagttggatatgctattccagccacttttaaatgctttggactattagatagatatctcaagaaactaatttaatatccttttatatatcatatattcgaacttttggcaaggtataactgttatttttatatactataaggtctaaacacagctattgcatgggaacaattatacttttttataaatccgacagtggaaaatcatatacgcaaaattagtactgaatattccattgtaaaattataaactaaacataaagtatgaattggtctcattcatgaatatacgtgtgagaaagaaaatgttgcggccgaagtttttaagtggtcatatttgatatttcatccttcacaaatgagtgcattgattaattgatgagcatttgtttttcgcatcacaactaattttgtaaaatagggttttactcctagtgaaaaaggattttctttggaatgaacttaccattttaattaagcctaaaaaaaatgaaaacaaattccgcctaaatattaaatatcacacacatttcaaccaaaatgatgtacattcacatttcttaaatagaagttactttgttaagttattattagcacattcacattttcaactattacctcttttgtcagacctttcttcattcgtttgtcagacctcttcattttttattttttattttaatattataataataactctccattcattaggtattcttcgaacggtgatcagattaaaaataatcatatatgtcccttgatcattaaataaaacggtgatcagattgagtgtaaactgtttaaggtatagatcttatgatcctgataagtattaaaactatcgattgaacagatgaaacataagaattgaaatgtaaatatgtgatataaaagaaaatgaaagtataaaaaaaatcgaacgtgactctccatttctctcatatttgaacatcgtacgagaatttataatcgaactcgtccgaaggcggagaatattaaaaaagaaaaagaatattacatttttggttatatataagagaaaatatccaactaaaatcacaagttttctgcttcatctcggtgagctgagaccaatgtccatcccattgaaagcaatcggcgcatacatccatagatcatcagagctcaataactgcgtaattatattttaaaatattagttagatcatattcatataacaattgaacgtacaaaaaaaaaacgatttgtatttaaaacccttgcttaccttaatttggagctgcaaaaatttgacgtaatgaactgcttcctcaagcattgtactaatatcgacctgttacgtatttaagcaattgtaaatgtttagaatctttattaacaatttcttgtataattaatgaatttgcatgtaaaagagccatatcttctgcatgtttaaacgtttgcatgagtttttttttttacctttgttccattggggacgagattttgtaaaatccttagtctctcgttaatcctttctcttcttttctgcacgacaaaaaaataataaaaaaccaaattaattttttgaaacataatcttccataaaaatttgatattttatcttttttgtgggaaacaaacaaagcaatttacccttgcatagaggctttgaggatcggtggctgcaccacgactggctcttgttttaccattgaggttgagggcctttgagggatcatcttccttagaggatgagtcttctcctccaccgtcttgatcagcgcagtttgattcttcctccgtacagaaagtggtgcttgagttctgtctactcatcattgccccattctttcttttcttcaacttcgtctctccttcttcctcttctccttcattgttatccccactcatctctacgttcttctgggccctcttattcactcttgctctcttgtttttctgagtccatggcaaaccgtttctatattagtcactaaaccaaatgtgatctctctagctaattgccaaccagttcgaaaattaaagacttacatcagtagatgtggcacgggatctctttttggagccggtgagagattttgtagtagtcacagagatctcagattgcaacaagctttcctcgtcatcgtggttctccactacggtttccaaaggcataagagtctttccagaagagtatttctcaacgtcacactcacttgtctcctcaccaacaaggtatgagtttgtattgatggtcacatcttccatcccaaagtccattgtctcattttggttctcttcaaccgtgggtggaacaacggtgtaatatccgctgttcccagcgctgtagctgctgctctcttgagagaaacagaagctaccggcttcagacacgaggctaaggtggttgtgatgagaaccaaggttccaatacaagccttggtggtcaccactggctgctgcgccggaggatgagccggtgccaggatgatcataagaggcgagaagctggttcatgaaatcggcttcctcggttgcataagtgtacattcctccgaggttgttgctccattctcccatggcttccatttttatatgttttgttaactaagcgtcttaattaagagattaatcttaattaagaagattgttagttggaagtcttgtgagaagtgagggaatgaggaagaggagttggaatgtatatatagagaacatgagagatagtggataaataaatgtcaacacataatgacactagttaatcatctttctaattaatttgtaaataaccaagtctgggataccattagatatggacagctaattatggtgggctctctgcaacttggtcatcgaacattaagtttaatatatatttgtcgtttgtcgtttatgattctgcatttctgcttgttaatggcttcacttatatatgttaaatacatcgttttaagttaaaaacaagattatagttggttgatatactagttcatatgagaaatgattgtggtggccgtattcactgcatatttaggatcaaaattggaagagctcttagcttagctcattataattttatcgacttccatgtttcgttagcatccgagtaataagagataaacagatttcttagcaaaagtgttttttgcaaactcactcgatgaaatagtagatgtgttaaaaactcatgaacgtatagtttatattaatgagtttttttgcacacaactatgattcaaattcttgggaacactgaacttacggttagaccccataaactgctttctaattgcgccaatccgttgagatcgcgagttttgatgttgagtatcgagtaaatacaattcacaagtgttgatccaccttaaaaaaaacttcatatcataacgtcatatgatacctatgatatgaatgtttttcccctaatgacatgtagttaggtccccatatagttcaacctgccatgatataagcaagacttatttttattttaatagtaaaaaaaaaaattctccaatattctacatatagtaagaatattcctatatattgattagctataagtgtattataatttatagcttaaactaaaattctgcataattatacaacgcattaaagtattaagcattttttactttacaaagtaacaaacaatcgagaaactattgggtctgagtagaaagaatgatattttcccactcacccgctgactagaaaaaaaaatcaaaacttatccaaaatccttacaaatttcaaatatattatatttagatagaagcatatccatatgctatacgacttctaaagagaaattatctaactagaatactgaatacctatacaacacaaacacaaagatatagatttatgtacattgtctctttctacttttacattttttttcaatttctatatttgttgtcagctgtgttttttttcgaatatgcactgactagatttatgtgctaatgtgattaaaatagattacaaaatgatgcatactctatggacctagacggctagacatatttctcgtctattcgatgattaaatcatgtaaaaatctaaccttgaaccaatcaataacggattaaagaggtacgacgacttacgagagaaaattattgcgtttgtcagtttgtgtattatgacaatacttggattatcctaatttttagttgtaattattatatcaaaaccgaaataaactaaggaatggaatatttcgacattaagcgtaattcacttttaggtcaagttgatgcgaaattagaaacaaatgacaaatcaagcctatactttgaaaaacgccaacttgtagtgacccaaaaaccggccggttttttcccatctattttgtgatttgaagttttaatctacatatattgtttaaatttattattattttcttttgatattgtgtttttgatgaaacatttaaaaattaaccatctaatttacgaaactaagaacacaaaagctcttcctctaacgcccttgacaacttagtagttattttatattaaaataagaatcgcgaagtctttggttgcttaagttgtcaagttccatggataaaataactgtgtagcagaaaataaagagttcatgagaatgaaagagagagagaaagggatgtgaaatgggagaatcagagacctggttgttgaacgtgacagtttctgcatcatattaatgtttttaaaataagggagaaagaatgatactgagttatttggattaactatattaagtaataattggttaggttgagtcaaccactggacggcagatcgtgcgcgtggaaagtccaaaagctcataagccattcttgttattaaaaaaaaaaacactatctatctcagttaaatgtgtatgacatttacttctaccatgtctatgaaatttactttctgatcatgtaatacttactatgatttacgtcatgtgacgacgagcatatactttcaaaaatctacttaatttgattacaatctcttttctaattatgatcttgtagagaatgacaacaataattatttctcatatgcatgagttctttcttttatggttttcatatgcatgtgttcacaaaagtaattttgtggtatttggtcccaaaaactatttgaacgaacaaaaataggcaaagaaaggtgacatgcaagatgagagtgtatgtattggtgagttgattttagcaaatgacaaaaagatatgaagttaggcgcataaaatttatcttgtaataaattagattcccgtatataatgtgtttttatatattaatgttgttctcttagctttcatctcttgtcgtagagcgtaaatactccaaatatatagatcccaagaaaacggttattaactcgctaagtgaataaggtagtttaatttccttggaaaattagaaatgttaatcaatatcctaattaaactctttaacataaccttttaggagtatgcaggaatcgcctaagagactaaataagcttttcggtgactgtttgggagctaaatgacgtaaataaaataacaaaacaaaccaaatatcgacccttatgcataactaaattgtattagagtctcttactattacactttttttggttaatttattcttactattacacttaatcaattcaaacctgatattttggctaaggaagacagctaactaactatctgcgttactaaatattaagagtacacctatatataaaccttactgtataatttccgtttcgtgtgtgtcagtgtgtgaatttatgtagtacaaaaaagtgatgcatggcttcatcaaactagaattgaaaaaaagagagaaaaaaagacagtagaatgaaactcaaggaaatgcaaccctgaaaaggatataataaagaagaacatataaagaagaaactgacaggatttcataaaatgatctatgtctagtatcatacaatacactttacattatagtttgcataaaatttatctattttattctggattcagtagaataaaatctgtgcacagctcgaaagacccaattgggtcatcagatcagatttttttcccagactaatgattagaatagattaaaattatattgctcgaactatttactcagtattgttttaggagattacttctttaaagcaatccttgcacgcacgaccaaacattattgcatatcaaacaagtatttgttttttcttttaaaaacatgtattatttagtttaataagtagtaattcttacaatttctttgttgggtagttagctggcaatttgatgcccctaaagaattaaaaaaaagaagaaagacaaacaaccacttttttattcttcataaaattgtcgtttcagttaacatggacgctattttgtaattttcaacctagttatttcttgcgtttgtttagtactactgttttatggatattaattctaaagaacaaataccggaagttaatcggacgaataaaattccaatctaacagctttgtcttttccagtaatgaagaatttttttagatgtttattctgcagaattacttgtaattacttattcaacccgtacataaacataaataaccatacaatcaattctatttatatttatgagaaaaaaagaactcatataggtgtttaatttatttatttttgtttcaaataggtatattttttcctaagtttctatgcaaaattagatgactacgaatgaaagagttatattacataaatacaggacgaaaaaagattttttttttttttttgggcaaagaacaagacgaaagaaagctatgatgtccctatacaggtcctaactatacagtctcagatcacataaaaccaaaaaacaactatacagtctcaaattatataaacattaagtctattcatatcggataatatatatatcgcagtatctcacatctatattgtcatgcatcatatagtttcttagttaaagagactaaccctaataaatgtgaatactatgaaaatgtgaaatacattcatataatgcatatgaagtctaattgacatacatcatcaccgaaacgaacattgcttacaacgtacgtcaacctcttggttcttaagaaacgttagtcattaccggtatcaaactaggtgtctatccagcttttttttttgttttaatgtttcatcttttgatccggtcgtcggattgctttattttgaattgcgtataaaaaaaaaaactgatcctttttacgactttatttgacaacgtatagaaagtgaaatagtgataaaatagccatgaactcattcttatccagcaaaccatgtaaagtttttagctcctttcctattattacagatgagagcaacgctatttttgctgaagttatagggtattatggagtcattaattagtgaaatcttcaagtttggaaagtaagattattaatttgcgataaaaccataattagctagagatcaaggtgcacaacgtgtgtcggatattcctcagcatcattattcatactaaatttataagtatgtttattagacacacttaaaatatagacgtagacgcaaaccacacgcatatattagaaaaaatgatatgcacaacacaataatgaatcatcggaaaatcacatctgttaactaatattaacttgttaagaaaagggcacaacttatatcagaaaatcacatatgttaactgaatgatttaagttatatttggatcatatacatttctgaatgaacttaattgatctgatcaacgacgaaaataaaaaaacatgagacaaaaaaaaaagcagaataatgtaaaataaatttagatttttcgatgaaaccggaatctcgcgtgaaccaagtagttgtcttcttttaaaaaacaaagtgattttttgtgatcttaccgttctaagtggctatgaaaaacaaacatctaacatttaataaataccgtttagacacttaaatctattgaaattttactctgtaagacgtacaaactaatttctctgtttagcctatcaacacgaagcaattatttgatttatcttaattaaatttgattcggctgacgattggtaggtgaagagaatgtttttattcgttactctatataataatttgaaattataagaccacctaataatatatacttctaactcttctcttctttatatatggtttcttgatttgatgatataagcatacgattatttcagaatcttttagtttcatttttaaactgtttgttacggtttgcgtccgcctcgtgcattcgtctttttccatttgattgacttcgacgtttggtgcattgattgatgtatgacaaaaaaaaaatatgacaacaatagtctataggcaacaagtaacactaatattattgaacggataaaaaacatgaatatatacattatgataaattttgatcaaatcatatattgggcagaggaatatatgattgttttggctaccggagtagatctcaaatcgaaacttagattaatttccaacagaaattaaccacaataaaattgatccatgaaattgatccaaacgacgagtcttcaacagaaaacataattttgtgattcgaacccatgaccttcaagacaaatccacatatacattaccaattgattcaattgttttattgttatatatgcagattttaaatacctaaatatgtgttactattaggaagatgactttctacaatttagttcaacaaaaaatgagccaataaagaaaatcctacattttgtatcacaacttcttctttcttctttttaaagaaaccgacattagtttgttttaattaacccatcaaacatatatttaaaaatatgtcagttcttaagaaatattgtctattgatattaagagctaatataacttttactaatttgagataatttttcatagtaattgtgatattttctctttctattaaaatattagctcattgtaattccagttacttctagatatctttaaaatatgcctcttttggatcttgacagcattttttggattaacttctgaaaatcaaatacataaaaacatgcatataccaaaaagaaatatggttcaatttggatattcttcaccaactaattctatatacttttgacatttcgttttgtaaccagttagattacaattgactttggtttttttttatcacctattaaattataattgactttcgttcaatgtattttaaatatttttattgtcttaatttttgatgttaacagctaaggcataaataagatttacaaatcgaattatcaaattcaaccaaaataaaataaaataaaacaaattacaaaatggagaacgggaaaagtcattttcctagtatttggggaattaattaaacaaaactatgcaccacatacacaaatttcatacatatatctatatgcaaaactttatataaattcacaacagtcatagtctattgtatgattattatttttattatttgacaccgaagctgatatttgtgactgttccttgttcattatatattcatctgtcgttttcttaacttctacttctaatactttgacagtttttttttttacaaatttaaaagatttgaaatcgcttagaaccaatcatagtaaatatgacaactttactgaaatcttccccaaatcatattgtttgtttgtattttctaaatattaaaataaaaagcgaatattgtgattattcctagtttcatatcactattcagagcattttcgtgttgtaacatttttaaattttgagtttgctagaaattttagatgtattagatttttttttaagaaaaaaaaatcaacgtcattaatgtactaaaatcaacttttcagatttataggttatttgagaaaaattattcagttaaacttaaagtttccgctactttaatccatataaaatgggcctgtaatattcatctgactgaaatcttcttgcggaaaaaaaaaagaagtcttaaatcttctttatgtccatttaaagtgggcctgtaatattcggcccaccatgtaatgaaaatgcgtttcgttttgttccgctcggacctatataaaccaactatgagggccgtcgcatacgaaaattggggttttcaattttatttcgagtgttcgctgttggtcctcgtcttctagcttcgagctctgagaaatcgaaaatcatgggtcactccaacgtctggaattctcatcctaaaaaaatacggacctggatcttgcacctggtaatgtgcatgcaataacctctgttacttattgtgatctgccatatagaataagtaggagcatgttttttatagtcatggactcatggtttgtgatgattttgaggaatctaatggtaagtttgaaatccatggatttttgtagccgtgtgtgtggaaactcccatggattaatcaggaagtatagtcttaattgctgtagacagtgcttccgtagcaacgccaaggaaatcggattcattaaggtaaacatgttgaatgattgtcttttgtatctccatgagaatggtccatgatgttttctcactctcttggaaagatgattaactcttctggttttgttttcctttgtttgcagtaccgttaaagaccaatggtgttatgaggagcaatcatgtgaaactttcaagctttaaaattgtaatggatttatttcgataaggcttttgagctgttgaatcttttagctttttgttttaaactcaatcttggttctctacaaatgattatcatatagatttgagtttctactatttgagatttgtgttgctattatctattactctgttgatagttgcttaagaaccatataacaactgttaaatccttccactaagggaccaagtactttggaatggtggtttattatagatgacactagtggcaatgtgaatcaaacaaagatataagtatagctgttcacagttaacgatgtacttaacgatttatccacttaacaagacaagtgacaaacaaattaaaagagagatcaatgaagcaaaattatccaacgaatacaaaagtttagtttgaaccagcaaagttattgagaaatcagaaaacacttcacttaagtttacgcacgtgtgagtttgtccaaagtccaacatgttcttttacttcttagtttctctcacgtacgacgaagactttctcgtggaaacacggagaaccaaaaaacagaagagaagcgatatgaaacgaagaaacaaacaagatcatcgtcccttttgcctttagggcacaaaggggaagcctttttcactgggtatgtttcttctctaatgatccatcttcttcttccctctttcgattctcaatctcacgaaattacctgtgacgcttcgatctctttcaatttcttcttcgatttctctattcctagtttataattgattgcaatttcgaaatcgtcccaattttgattatcggaatctgatttttcaggtatgtgttgagaatttggggtttttaggtttttggctcagaagagagaatctgggatcttaaaaatcgaaactttctagatgtggttttagttcaacttagttgtagaagatgggatcaaatcaaggttcttccaggttagatacgttagagattaaagctctcatttaccgggaaattgggaatcaaagagctgagagttacttcaatcagctcggaagattctttgccttgaagatcaccaaatctgaattcgacaagttgtgcatcaagaccattggtagacaaaacatccatcttcataaccgtcttatacgttccatcatcaagaatgcttgtattgccaaatctccaccatttataaagaaaggtgggagctttgttagatttggtaatggggattcgaagaagaacagtcaaattcagccgcttcatggagattctgcgttttctccttcgactcgtaaatgcaggtcaaggaagttgagagacaggccaagtccacttggtccacttgggaagcctcatagtttaactacgacgaatgaggagtcaatgtcaaaggcacaaagtgctactgaattgttgtctctaggaagtagacctcccgtggaagttgtgtctgtggaggaaggagaagaagttgaacaaatagcaggaggaagtccaagtgttcagagccggtgtcctctcactgctccgcttggtgtttctatgagtcttaggaatggagctactagaaagtctgtttccaatgtgtctatgtgtagcagaagtttcaaccgcgagacttgtcagaacaacggtgagctacctgatacaagaacgctgaggagtcggttggagaggagattggagatggaggggctaaagataactatggactctgttagtcttcttaatagcggattggatgtgtttatgagaaggctgattgagccttgtttgagtttggctaatactcgatgtgggactgatcgggttagagagatgaattaccagtatacacagcaaagcagaaggctttcatatgtatcgatgtcagattttcgtgctggtatggagttgaatactgagatacttggagaagattggcctatgcatatggagaagatctgctcccgtgcttcagataagtaaagaacaaacatcataggttagatacatagcatttgagttttctggtttggtttgcgctgttgaaaaaagttactgggatggtccaagtttcaatggaagaaggttttgaagagaagaagggtgggtcttcttgatgttgtacaagttcagataatagagtgagatttaagtaagagttttttttgaagtaaacgacattttgtttagctgatttgtttttctctcatgtgtatttttccttgtttgctctctgatgtaaacaaagttaataatgaaagcaaaaaaggcttcttgaaaagattcgtgtgaatatttcatttgtctggtcaaagtcactaaatattacattggaatgttaaaacccaaactgaagtaaaaagcttaaaacaaaaagcgcaagacataatcatactatgagacatgtccaaatgcctcgaagacaaacgatcaacttatttaaaaaaatgcatgggtgattgattcaattcaccaaactgttgcagtaagagcattcactaataaatccacatgacggtttggtccactggatataaacacattgtcaaaccactcaagcgttccccaaatttctccattttggcgtttttgaatcgcaatttccgcacaccaaatctttgtttcgtcatcaactaacacatactcctcccaagaaatcgccaattttccacaatgatccgccgatttaaaatttctataataattagtaaaagtaggcagtccttccaaacccttcaaagctgcccattctcttttcttgaggtcataccaacgtacatccccaagactgcaacggtagaacacgttctctatcacacaacaagatgatggatccagactccatccatgattcaggcatatgtctgcccctctccatttacctttatgcatcttgtaagtgacatctttttccctagaccctacatagacggttctttgataacttatgcttaagtactcagagcctttgcatacctcctcgctagggatctgtaaaaactcccaagtttgagtcttcgtatcaaaaatctccatccaattcattgaattgagattttcgcagcctcccgtaacatatattctcccatcgagggtacaagcagatggaaacacacgggccacccgcatgcttggagcttcacgccatgtgtgagaacgagagtccataaccataacgctagacaaagcgttataagtctttgatccagttgcatttatcgaagcgtttttattctctgatccaccgccaatggcatatatctcatgaccgaccactacaaaacccggcagggctgcggaagtaaaattgggagatgaaatcgggaccaaaacttttttggagctatttggtccctggtagataatgaaccaatgtagttgttcagaatcggtatggagtcgtacgcacacgtaaagacaactctccgttccgcctaagaggattcgggtttggtaaagctcctttgaagcaagaagaaagcgaaattttttggagactaatgagagagttggataatgtaatcttgagacgcgagctaagcagttaaataccaaatcatcaggaagcattagaaatcttttaatcgagggttcttctccatattccatggttgttgatcactttttttctcttacggttgttgatagagagcggaagctaaatatcggacgagaacacaagatctctaggagaactcggatttacaaacggatcttgcttagaacgtcaaaacttgatgaagaagcaatagagataaagtcgagatcggtagtgatatcgacttggttttgcaagcccttagggttgagagtcctcctctctaggctttatagaaagctctcttaaaactctttattcaataatccaaaactaatctattctacaacgtaaggattctttaaataagaatcagaaacaaagaccctaattctaaaaagaagttaaaagccaaacacgtaaagcccacatctttaataaagtccataaactactaaatcatgaatgagaaacaataaagaggcttggtcacgacgaggcccatcaaaggcgtgaacaaagcaaagatgcgctgcatcagttgcttattaagtaagaacttgctttttttaacaaaacaaaaaaaagtaagaaattgttttttgcataagcttctttttgtctcgactattcttgtctatattgtttatatatagattcctaatctcattgggagtttttcaacgtgtttggaagtatagtaagtttctaattttctataacaaaacgtatattctcttcacttgaagaatttactgatattcaaaaaaagaactagaagaatttactttttttttttatcattcctttttactaaattgttttgttttgttctttgtgtgctctttcttctggtacagatatatatgcggacctacgtacaagaaaggaccctaaatttctaaaattttacttactgttatgagaaaacaatacatttggcatatcaattttttttgttacaagctgtcgcactgctacctgctaccctaccaatctgggacgcgtataagattgagaacaaaaaccatattttagcatacatagcatttggtttgactccgttggtctcgtgtaaattttccgtctttgttaaccgtactgatgtaactaaggattaatataaaagacttgtgtcaacagtttcctttgcctggtaaagactcaaaaagttgatcgaagctaaagaaccaccattttactcaaatattacatggaatactaaacatagaattgaattaaatctaagagtgtaagacatgtccaaatgcacagttttccccaaaactccttacattatatcctcctaaaatctggagagaggaaacaaagaatgttgaagaatgccctgtttcttttagtaaaagtgttttttggcttcatttcttcatttctaaactgagagagtttcccagagagctttttcaaatttcaatggcggttggcgtcgcacggcttgccatataagttatgtagattgtccatagatacgaaaacgagttgctcacaagtggctgcagacaaaaagaaaccagacttcagttgataaccaaaactcacgataagacaaaatgaatgcagcaaatatatgatctgtcttgaacaaaaggttaaccaaagtgaagctaagttggaaataaagtggtaggtatcaatcatacatacctgtaaataaacagggcagaacttgaaagtaataaaatcacacaaaggccaatacatgacaccattaagcattgtgggaagtaggtcccttttcaatctagcaactatctctgaaccattttcacctgaaaaaataattgaaaatcagactttgatgtcatcaagaatagcttaggatcaaattctaacaacaattctcctctcttcaaacgccatttagagaaagaatgtaacatcaaacaacctgctctataacaacccttaagattgaaggtcaacaggatctagagtttcagaaaaatcatacttttatatgttgctcaaagaagaatatatagactataagaaaggaaccagttgattatttttcatgtacagctgaaagcttaccctgtagggctgcattcagtgagaagaaaacaacattcatggcaggcccatagactgtctgtcccatggccattttcttaaacgttgtgatcaaatctcgttttgggaagagacttgacatgagattgaaccaatagtgaagtgtaggacccaagattaataacccatatcctcccatccttgctgttcttaccaagtcataagaatccactgaagcttgtggaattgtctgttgaaagatcaaacaagtcacacttttgtcaacaacaatacaagaacaaagaaacgtaagcaaatataacaactcaattcacataaaacccgctactacatccacattactaagaatcgatcattacttcttaatctagaagtaattcttgtcctatctcaaatctctaaagcacaatggagatacagtgacttctactattaccatttgttagaaaacacaatggaatcttaggactgaatcaacaagaacataatcacagaatatctaaaatctgatttgtaggcttacaaaacaaaaatgagatagatttttgaaattacctgcgaagacaaatcggctgctatgtaaataagcgaggacgtgacggatttggtaagaaccggccgagatttcaccattcccaaataccatccgatgaatcctgctgtagagaccgtcgaagaagacgaagacgaagacgaacagaaaccagagacacctgtttcctttgctttcccgagaaactgaggcgtacgataaaaaggcctcgactgcaatcgctggatgtttcctcctatcggtaaagggtcgagctttccaaaaggattcgtcatcgttgctcgctgtaatcgaaagatccgagcggcgtcggaagcagcgtttctaaacaatgcgccggtcattgtcgtgtgatggctccgagagttttgggggttcagggaagggttttatatataacggcggtggagaagaagaaacagagctctgtttttttaaaaagtttaaatgccaataaataatgaaacacacaatttgtatatttcgcgagtataaaggtttttctactcgcgtctcgtaccattgcaatcgttcttcataaattagttttgttcttaataaattaattaatcatgccttttctagatacagaattgtcgagatctttcctaataaccgaagtttttgtgaaagctatagtgttacttagcacattgattatatataagccaacaaattgattattatttattattagctaatcactcaataaactcaaaagccaagccaaattattggagaaaataacctttccaatttctatgttaggcggaggaaagagtgcctgaaggctgaagagcgcgtgaccgtcaaaggtggacggttcaaaaaccaaacatccccaaactgtttctgttctgtagtgttctagggttgtttacacgtcctgttcacattggttagtgtcgacgtcatcacttctgacacgtaaaacttaattcagtgacgctaacctttagtagaagccacgtgttgcgttcgtgtcccaagttccgacttttagccactttttatgaactcttttatttttatatatttagtcaaaaagaacgtagatcattggaagagaagattctcttattttctgtcggcaatttttcgaagattctaaaccaaactaaacgtagatgatgtcacacacacaaaaaaaaacaaaaattattatcggtatcactcatgactcatgtgtccacaaaaactcgaataaaaagatggtccctggtgtgtaagctcagatacattttttatatatataacatggacaaaataattttccatttaatagatacaaatacaatcatacaacacattttgttaagttataagggaaaaaattagtacacattgcaaattaacaagagacttgacggactcaaacgagcagtaaatactcaataccaagtaatcagaacacccaaatcgatccacacttgtcatcacttctgtgttaatcttataagttcttatatttcttttactgaaatatcaaacaacaagaaacttctattgttcaaatgatatttcgaaccaagttttcattatcaggttttaatttttgtatcattcgcattataagaaagctaaatagttacactgtttcagcgaagaactgtacacgagggatccagcagcagatttttagtcaaaagatagaagctgtgagactgagatagatatatggaaaaaaacctaacttattcttcctggtcttggtctctgatccatttggttgccacccatttctctcctttggtcaccgggcagctcccgtgaagcgaagtctgcagaagcattggaaccacagcaaagagctcctattagcatgaactaatccaaggaataggagtcaagagaagaaatgaaatgtgttcaaactttgtttacctgatcaatcgttccatttggaaacacggaataaaaaagaagaccatctcctttccgaggctttactttcaacccaatacattgcttgtaatcgtatccgatgcccatattagaaccgttctgttaaatagaaagcgtttaaatggaatcaaaactaacgaaagggtctgtataataagtaagcaaataatatattataaactgacctcaaatgggaacatggtttcaccgccttcttcaacatcagataagtacaacaggaaggaggcaatctgcgtaaattcaaatgaggtctcgggttctaaagaaagctataaatatgacagatttaaggattttaccctttggcttgattgtggtccatattctgttgggttgaaaacatcatagtgggaatcatacttttggccaagttcataccgtaaaatattgaatgactgccaaaaacatcaaatctcgtacaattaaaggggtgataagcactaaaccaaaggccatcaagcctacgtttgccactttcaacatgccttagttttacgattcacatagatttgggaagtagagaatcatacctctccatgggaccttgggatcatcgtagctcttgcgattttcctttcaacaaaatccagagcaccagtactctcttctgaagcactgataaaagttcctgagctgtataacaacaacacaccaggcaaaaacactgaggctactgatgaatgttcgaaacatgaaactagaaagaaagaaagaccttgttctagtgcccttagtgttctcagcagtttctcctttccggagagccaaagcagaaggtttcagattaacctttgctctctcaataatagcttggcattgttctgcagttgcaaaattcggaaaatatatagccctaggtctccaactaagtacctgccaattttaaaccaaataatccataaagatgaagtactaaatttcactagttgactaattgctaaaaaacacaatactctcactcacactcatggtcaccacacatgaacaaaaaaacaaagttcaattagataatcaaatgcacaatcttgccctaactaatcgatttcacctaatttgccaatccaaacatcttaaaagtcaaaaaattagcaacaaaatcagacctgaaaaggaatcgatccaatagattcttctccagtaacaccatgaggcatcgagctagcttcttcttccccattctcaaccatatccaacattctcaacctgggtttaacacgaggcacattctgatcccaaacatagaaccctcgattagtcacaaaaccaagctaaagactccaatcacatctaaagagtacagagtaaaagatcagagagtttccacacctgagaaagtagagtggagccatagaaaccgaagaggaaacagagagaacagaagacgataactgtggctaaccctagcttcttcctcctgtagctcttcaatctgctcttcatcgagccttcttccttccgatcagattaagtttccgatggaaatcttcgccggcgtaaacgatcagataagtttccgatgaaaatcttcgccggcgtaacgaacctcaatatcgggacgcctttcgtcgatccaatgaagcaccacaaatttctatttactttaaaatatattgttttatagtttaatgatcagatctcgttgaccagtttgtcattttcttcactggtcaacaaatacaaaaaaatgcgccgaatttatccttttttttggttgaagtttggttgcgtagagtggtttaagttttggttcgatggaacttgaacgtttttgtgatttgaattaggtgggcttcttttgagttgttttgcttcattcaggctgtcgataatgacttggaatcgatcttagaatgtaaggtggatatgtagtccaacattgaattgtgtttatggttaaaaagtaaagaatgattatttattaattatatacagtcaaattagagagtcttaagccgagatcaatacattatccaacgaaatttcaaatgagtttattttcttaactaatagtctatattcttgcaacttctttttgataaccaaataaaatgtgtaaccattctacaaatgattttcatatagagatttgagtttagaaaagaataagcaagaagaagattcaagtagcctttgtgtcgagaagaaggttcaaggagctctctttgtgggctatagaactgttgtttaagaaagaaggtgactcatttaatgtttggttcttggggttcacagagcattgttcactgaagagagatgtgatactagagagattcttagtgagcattgacagaaataatagtagtactaattaagtttttttttgtttgatgaatcttgtatgcatcggtataatatgagtggatatgcaaatgttaaaaaaaataaaatgaatggatctatatatgttgaaaatcaccctatgatccataacaacgataaatacgcatccataatgttataaatgtaaaggtaaacatcatgatcaaaaaagttcgacaacttgggccaatgaatttccagttgcttccgcgtatatatataagtccttccacgtcaatttcttaatcccaaaatgcaaacctttttataacaaccaaataaaaatgtgccacttgtaattaaatataaattactccataagcaataatattcatcgttttaatagtatgctctagaacacagcacacaaagatttgttttgaccagaacatgttttttttcttataccggaaacggtaacgtgataataaaattaggttaataataatatagatactaagatgactagattattagcaagaaattgtattcagttgttatccgtctttcttagttgacaagcaaatatatcagctacacgttggctacaggttactcatccttacccattcattattcgctcattataacaatttcccactgatatattcaaatacaaaatatataagacacaaaatagaattaatttattgctatttgcagacgatgtaaacatttttgtagacatgaacaatttaattgattctttactcatcgtagacatgaatttatatttcaaaagggtctactatttctaaataatattcaaacattgactctgtaaatcacatataaataaatatatatattatacactacattaatataatatctcctatttcaaaaagaaataaaagtagctgttgaatttagatatttttttgttggaccgaatcagaatttaagtttttgaattgttccagaagaaagatattttagtataatatacggcaatgacgtttatgtttgggccaaaactttgtctatttattgagaaaaataaagctaaatggagaagaataacaaaaataaacaacgcgttgaaaaaaactgcaaaaaaaaagagaagggggagggcgaaattaaaacaaaacgacgcgtagtctacgtagccttctaagaaacggcacaagtacaagtcatctctatcaatattcttcttcttcttcctcacgcggttttcttttaccaccaccaactcaacacacacacgaatcccttaaaaccgatcagatcaaacaaaaacgaacgaatcaaaattcaataaaaaaaaacctttcgatttctctcatccaatcgaatcgaaaatcttgttatctctttctctctaactctactgcactcagaatctctctgtatagaaaaaccctaagtaggttgtgatgttgcgagctttagcacggcctctcgaacggtgtttgggaagcagagctagtggtgatggtttactctggcaatcggaattgagacctcacgctggcggtgattattcgatcgcggtggttcaagccaattccaggcttgaagatcagagtcaggttttcacatcttcttctgctacttacgtcggtgtatacgatggtcatggtggacctgaagcttctagattcgttaacagacatctctttccttatatgcacagtaagttataatcccactcttccttccctaaacttgttttaggattctttcttcttttgactctttgactacgtttttgatggtcaaaacttatgagatctctattaccctgatcatttcaatattaaaagattcgaattttgctatgaagttttggtctttgtgaacatgttcaggtttgtaaattgcctcttgaattgattttgtagtcatgttcttgttagtgaaatttacaggattggttttatgattgcagaatttgcaagagaacatgggggattatctgtagatgttatcaaaaaggcattcaaagaaacagaagaagagttttgtggtatggttaaacgatcccttcccatgaaaccgcaaatggctactgtaggatcttgctgtcttgttggtgcaatctctaatgacacactgtatgttgctaatcttggggactcgagagccgttcttggaagcgttgtttcaggggttgatagtaataaaggtgccgtagctgaacggttatctactgatcataatgttgctgttgaagaagtgagaaaggaggttaaggcacttaaccctgatgactcacaaatcgtcttatacacacgtggagtttggcggattaaaggcattattcaggtataacttagttttgcttgcctgcttgttaaattgcgtgtgattacatagcatctgtgatgaagttataatatttaaaaggtgtaatctgatgttgttttttcttttctcttttcatttatataaatgggggcttgcaatgttccaggaatccgtcacacgggctcctgcaacgtttcttccccagtggattttgtgcttttctaagaattcccggtagtcagagctatacataataatgaagatacatgctttttagttgcttgtgacctttccgtgaatgtttgagctcgttgtatattagttagctaaatcgttttcatatacgcttctttataggtatcgagatcaattggggatgtatacttgaaaaaaccggagtattacagggacccgattttccagcgacatggaaatcccattcctttgaggagacccgcgatgacagccgaaccctccattatagtaaggaagcttaagccacaggacttgtttctgatatttgcatcagatggtctctgggaacatcttagtgatgaaacagccgtagaaatcgtcctcaaacacccaagaactgtaagttttccctaaactcaagtttgctttgtatcttcacatttatgttagctacttagtttatttatttattaactctgtgttctacagggtattgcccgaagacttgtaagagctgctctggaagaagcggcaaagaagagagaaatgagatatggagatataaagaaaatagccaaaggaattcgacgacatttccatgacgacataagcgttattgtagtttatctagatcaaaacaaaaccagttcatcgaatagtaaattggtgaagcaaggaggtatcaccgctccaccggatatctactcattacactctgatgaagcagagcaacgacggttactcaatgtgttatactgactgtttgattatggtaaaatggctgcttgggaaagatccgaatagggagaaaacttgtttacatatttgtttatttgtttttctacgaagaactggttttttttttttttcaatattggagttggatttgtatattcttttaccagcaaagaaggtcgaaaccctttagtttttgggcaaagcagttttgcttttgacacaaacaatacttttgtatgaaaatctagtgtgaaaccgttgaggacaactcttcatatatcagattgtttttttttatgaccttgtatggagagattagtatattgaattatttgtctataataactaaataaaaacattatcgatcacaaaccaaaataagccaacaaaattccagatgttgcctaaattttggaaaatatgcatgacagacattcgaaacttcagatccaaatcaaaccgaaattgaaatttgtcaaatatctaaaccgaattgaacacgagcggtttttgagaatatgaaattgggcagagcaattcaaactcaaaaattcaacaattccagaagaactttctcagaaaagtttcgacggaagaaaaagcaaaacgatgaacgtcactcttttggtcgcagacgccgtttggtcgaacattgaatcaaccggttcaggtacttcaccattttactacttctctctttccttttccttgtttacgacattttattccgttgaattttccatctttttctgcagtaaccgaagaacagctctcaatgtcagttctctcttatacatagctgggattctttatttttcccgaaaatatttattgatttttcttcagtcgtttggtatgattagggtttatcgatttaattttgcaaatacagcttgcagctgttgtttggtaagaatcttgagaaagccaccagaataatcgacaagagaggcgtcaagaaaatatctggcttacccagtggaagatccatctttcaggtttcaacagttctctctggttaataaaagcaatcatatttgattatctaagaagatttgtttttttgtttgggttttcaggttgtgggggaatctcagaagagagaagagtatctctgcttcccaggagattactgtggatgttattctttcttctatgatgttgtaagcagaggagagcaccaatgtgtaagattcttaatcagaatgcttccttttctgtttagagattttgtatcaatgttactgacttgttatattctacttttctcttttggctagtgtaaacatcaattggctgcgaggttggcttcttctttgggtacatacaacgaaatcgaggtttctgatgaccatcttgccttgatgctctcaaagatctgaagctttcaatacaactacatgtcttaggcttataagtgccagtaacctgggaatgatctgtgtctttgagaattatatggatcaagattcttcacatgtttgatgaacaatgttgcttcaccttttatgtttaacttgctgtatataagtcttgaactgctatattttcaacttcttaattcagtggaagaaaactatgaactttgtaaaagtagtattcatgcataaaacttttagtgactcgtatacaaagattaattaatcaaaaaagcgtagaatggaaacaaactcaatgatcaaagaaaggaacaagtggatttagagttagtgtgaagaagggcggggaatggggtggacagagaatttcatgttgtggttgcattcgttgtggtctccactggcgaagtagtaagtctgaaccttacggagaagcaacttgaagcctcttgatgatgaacctcctcgtgcaaccagcttcttgcctctggccacattgcatctcttgaagctcttcatgtctgggagcaagtagacgtcgttcttcttcttgttacggtgcttcgtcttggattgggtttgatcatcgttgttgtacttgaaaacaagaacatcgctgacgtagaatggggcatgctttgctgtccattctgtgtaaccgtatccgtttttccatacagtaaccgcaatctttcttccagccggtattggagccgtgtggttgtgtgtagagccagtgatgctggagtggtttgagccagagctgtgattgttgtgtgtagaaccaacgatgcttgagtgatttgagccagagctgtgattcttgtgtgtagaaccaagtatgcttgagtggtttgagccagagctgtgattgttatgtgtagagccagtgctgcttgagtggtttgagccagtgctgcttgagtggtttgagccagagctgtaaccgttgtgtctagagccattgccgcttgaatggttcgagccagtagaggtgtgaccgttgtgtgtagagccagtggcacttgaatgattcgagccagagctgtgaccgttgtgtgtagaaccagtgccgcttgaatggtttgagccagagctgcttccccaaccccagtttgtatctgttccgtcggagctccatccccaaccccagcttgaaccacccgagttggagtctgaaccacctgaacccgagccagaagaaccgccagagttgccggatctccatccccaacccccgttcgaaccggactggccagaaccccaactccagctccatgcttcagcactcccggagaacacgaacgcagtaaccatgaggacgacgagtaacttacgtccacaataaagaaccatcatcgtgtcttcttcttcgttttttttctctctcttttttttttatggcttttgtgagctcttcagagtttagagtttcggtatttatagagtaatgagagtcggttcccattatttagtgaatataattttatttgtttttttagtaacagtaataggatttttttctttttcttggatcaaatagtaataggattttaaaagtggataaatctagctttagttattattgtttgaattttgatgagtcttttttttttttttttttgcatatacgattaacattgcttaaggatattgtatatatctttaacacacaaaaaaaaagatatagtatacatagttttgtttgatattctttttattttcgcacaaaaaaaaaaaaaaaatcttatttatactataatgaatctaaacatctgtccacctttaatccaagtacctctcccaactactgcgactaaatgacccatttgcctaaatgtagtcctttaccttactgaaaatagcgaggacaaatcagtcattcaccgccctaaaacacgctttgacatgtatttatccatttactgttattttatctgtaagaaatccaaataaactcatttctgtaaattaggaaacttctgagaaagtgacgaaagcgaagaaggtttcggaagtaaatatgtcttccttggggagcagcaaatccctgagggatgagatggaggtaacaaccgccgatgtttttccggaggttaacgccgccgctgtgacggaaaatcttgatcggaacgagcttgtgcttgctgacggagtcgtgtcggctgaggaaaggaatattgagccagacaatcgtggagagaggaagatagagagcgagtcgcctccagaggatgatgtttgcccgatctgtttcggctcctttacggttccgtgtcgtggaaattgtggtcattggtattgcggttagtcttttcatctttcttcttcttcttgattctcttgagccatttcatctacattgaagtatcaagcttgtgtctttttgggatatttctgttcgtcagaggtaaatttggagaattgtttgggttggaattggtttagggttccttttggtagccaagaatgatttatcacaactgattaacttttgaaagtgttgatttttaaaccatgctctgttactatggagtgttgtttgcaatgtcataaaaagatctgaaagtttcttaaaccggttgctgattttgttacaggaaattgcatcttgcagtactggaactatgctgcaatatctaggccttgcaagtgtcccatgtgtgttaggcacatcacgaagctgtcaccagaaccatctttgcaagagcgtcaggagcaagaggtgaaggaggttcttgataaagtccgtaggtataaccgtctctttgttggaggtctaactggctttgttcaggtacggtctttttgattcatgattttgttttgcttctctttactgtttcatgcatttcttatctatgtatatacttatttctcctttttatgacttggcaaaaccaccatctttcgaataattcagaaggtgcatgagcttccgtttctagtgaagagaatggtgtggcatatgatggatacagatgtgaacaatctgtattttcacgaagtgcgcatctttgcagttaagaacatcttaccctgaaatttacatttcatagtttagtgtttagttatatctctacccacttattcttgttgtcatttgttgtctgtactaatggccaagcaagacaatctttgtaatcatcataggagcaactagtttgtatttattcttgtttttaaaggccattgaaagatgagaaactaagtttctgtcggtgtttgcagatgttcatgagtaccctttacactgccgcagagtttaacttcattccaacgggtaagttgcctcacaaatcaaaaaccagcaatgaagggttaaacaatctcaatgtggtgtgtttaaggcttttaagctttccaagattgattttgccctcttttgtacaggcgggttcagaatagtgacagtttttgactacgctgcgattgctatgatcctgattctacgcttagtagggatatatcggaggagacgcctagctcagcaggttagacatctagcagctgcagcaattgagccggaattagagcaaagggaattgtaacagacacgtgaatctattaagtcttgtgcagtttgatccttgtggataagtttggtagtagatcatagaaacctcgagagtcgtgtgcagttttacagacaatgatattgcagactttaaaagtatatacatatctccttttctaacagtggaaataaaatattgattggaaaagatctctctggaaaaggatcttaatctttgattagatgatcaaagggttgaacaaatgttcgaagagtagaagtggatattctaaaagacgagtgatgagtgatttaaagattcaaaaatttcataattatctgaaataaaatgatggtagaagaaagaaacagtgcctgtggtctcgaaacagtgaaacgacatcgttttaatttcaaaaagacaccgtttctgttttaattaattgctttcaaatcagtagaagaagaaacatcgattgagctttctacttgaaaaccatcttttccgatctatcgaatcggagcggcgaaggaaggagaatgggtgtccgtacaatatctcaggaggcattcgacgatctggttagggaaaatgttgaagatcttggtatggatccctccgaagctctcgaagacgctctctacactctcaagctccaaggcgtcgatctctttggtccgtttacattctctcctctctttttactttctccagaaattggccttcctctcgaactggcgttagttcaatttgtgtgtttgtttatggtacagggatcattacatgtgttcctggagaaagtagcgttaaggacaatccggtgattgcttgtttagatagactaaaagaattcgacagtgtttcaatagacggacctcttcgagatgaggttttcgatgagatatcgagtttgttcaagaatctcaatgagctttgtagcagccaagaatcagggaacgctgcaattgcgacaaaacatggtgctgtggatttaacttgctcgatttgttccaaaatcaagatatctactagaagtaatcgtgttcttgttccttgctttaaggctttggctgtgttgatccgtggtatgacttctgttcttgaattagtcgttcttgtgtgttttaactttgatttgtgttgatcatgtgttattcaattgcagacattcagagcacagagagattcaggaattgtactggaccaaatatcgttgttgatctcttaaatgattccagctccgattctgatttgttagatgctggttttgcggttgttgctgctgcagcaactggtaatgaagttgtgaaacagttattcatggaactgaaaatcgatgaacttattctgcaagtgttgaatagagagagtaaaactaccattagagctctgtacgatgctatttgtgctcttttgactccagatgacttccgtgttgttgcttcccaagtaagtatggttacattcgtttggtatatgccacttttgactgcgggaatgaaattaagggaaaacagctatatagcacttagcaaacatttataatcgttgttttttgtgcttattcatggacatgctttgagaattcaaatccactagacttttgcttccatgtgtttcaggtttatggttatgcacgaacttttgccaaattagggattgcgacagccctcactgaagcattacaggcagggattggctctgatagtttggtgtcagcaagtactgcgttaaaagcaattgctgtcaatgtaagtctcctagttgaaatctctgtgtgataacatttatctggttaggttcttgcaagttcttcatctggttttgctgtaaacaggatgaaatatgtaaatctattgctgaatccggtggaatagatacacttcttcggtgtattgatgatagcggtgagcaaggcaacaaaactgctgctaagacatgttgttccctgttgtctaaggtgagtagcttctaatatgccctgcaggctgcctctgttgtcttcattgcctttggttattcaaaatccttctttaaaactcaggctttcaagtattttccgcaccatattaaggagtagcttatgttcatgtgcttctaataaatgcatgttctcaaattttaagcttttccaaagcctattactgatttagattagcattgtaaccacgcatgataaatgtttatctaaaatttgtattttgatctctagttggcaggaagtgactctaacaagagtaccatagttgagaagcaaggtctggacaagctaatcacactcgcactacgattctctgatgatcctctagtcatacaagaggtaagtatataaaccaaacgaaaaccctcttatgacactatgtcccatgcgcaattttaaatcttcctgtctagagaagatacttgtgactacaggtcacgtctttggcagttttccactagatagaacgtaatgtcgtgtgaagaatgtttcttgtagcattagggtctgagtgcataatccttgtggttgatccaagatatacttgattggttcaggtgatgttgataatctctataatctgtctgagatcaccagaccacgcagccaaggctatagaagctggagctggtgatctagcggtccaagcaatgaagaggttcccagtagctgctcaaatgcagagaaacgcttgcaacatgatacggaacattgctgtcagaagtgcagagaacaggtttttgctctgtttccaattcttgtcatccaacaatatgcacatatcgcaaactcttttataatatcaagttctgtctgcatgcacactacagaactattctgcttgctaatggaatcgagaagctgataagaactgctaaagccaacaatgagacatgcagagccgctgcaactgatgcactgagagaccttggccttgataactacaataactaaggtcaatctttctccattggttggtactcgcaacaaccggaatgaatccagttttttttttcaaaaatttcataaacagtttgcattgagttctctcttttgggtagaaggcattccgatctagtcttttttgcaacgattgcttttgttcgaatgcttgaacatgtagtaaaattgaaaggaattgattgaaaatttcggtgaaaggtactctaaatagtaaaaaagtaaatagagaaacagaggcttcacaatgagaaattttcattcattcactaaaatcattcgtttagtcaatgaatttcctttatttagaagaaatcgattttagtttgaaacaaggacaaaatgtttgtttgactaaagggaagagaaacaaagacaaaatgttcacgtccatggaatgatcgagctctagaagagtgtattgggaatattaagtacggatatatgtttttaaaagatgattaaaaaaaaagtttgcagcaaaatcgtcatgtggatgcgcataaacaaaaactttagatagtaaaaatgatgggctatagtgatgatgagtgcaactctatcggtttcagcttttaggtgaagatctgacaagctagccaacaatatctcgacatttgtggtaacttgtttttcttttattttccgtttttaaatgcggaaaccctttttatataccgaaatagaaagtaaatctttttagtggtcattaatacatggaggttcccatgattagccataagcttgtttaatgcgagtatatgtttcatcagctccgtttcaggacatatttaaggggcaaaattaatccagtagccaaaaatgtacatatgtaagggacatattacgatattaatatatagatccactaacagaaaaactaattgttaatttaaattatttctatttcatttttcactgtgtttgattaaattaaattgggatataaaatcaattcaaaatctgttattttaaatctcataccattctagtgctatatttttgaaaacttagatatttttagtaactgttctaggcataaatttaatcaattaatattttcatattttttgctatactatttacaataagacatataataaatcggaaaaaattaatgcataatattatggagagataaaacttactgaaaaataaagagtaacaaatcacatagtttatactaatactttgccaataaaaagaaagtttatactaattaaaatattattttctatactagtcacggtaaaaaaaaacatttctaaaaactacaggccccattgtttgtcagaacgttgtaagtagaaagggtaaatccgtcatttcaaactatctcccatgctttgacaaatcacaattcaacagttcacagaaaaagcgaaaacttcttctatctctctcatctttctgttttgtatagcttacttcaagctgtggtttaaacagaacagagaaagctgtttcctttttatattgacagagaaaaggaaagctgatagagagagagacagagagagagaaacagagttcaagatcacgagccttccttcttcttcttcttcttcatcgagagcgatcaaaggaacaaaaaggatctcaagaaacccacttgtgttgttggttagatacttcacgggtctctgaaaacgtctctttctcacaaccataacttgatcacccaatactccttttctcatcttaaaggctcaaattcatccacgtcacaccgttgttcatttcctctgatgtcttggtgtcgttagatattgtctcccaaaaaagaaatcttcttgacacagagattgaagtcgcaaagagacagaggaaagagggggagaaaatggatcgaccagcagtgagtggtccaatggatttgccgattatgcacgatagtgataggtatgaactcgtcaaggatattggctccggtaattttggagttgcgagattgatgagagacaagcaaagtaatgagcttgttgctgttaaatatatcgagagaggtgagaaggtcagtttattttcttcttgttttttctccttagtccaattttattttatgtttcaattcactaggttcttgaattcaaaagaaatcatttttgtgtgttcatcatccaatgagagatgtgtgtttggttactttatggttatgaatggtttaaccctatagatttacaaaattgattgatttttatggaagaccaaatttgctctgctttgctttatgacttatgttgtatagtgttgttttaaaggctctaggtgtttcttttgttatggaacgtggtattaatggtgggactttttgtatttgtacagatagatgaaaatgtaaaaagggagataatcaaccacaggtccttaagacatcccaatatcgttagattcaaagaggtttgttttcaactctcttttaagctgttttcttattattaacattttcaggaaaaaaaaggaattctataatttaatccttaggattgcttcaggttatattaacaccaacccatttagccattgttatggaatatgcatctggaggagaacttttcgagcgaatctgcaatgcaggccgcttcagcgaagacgaggttgttctctcttttttttcttgctttgatgattaatcgaagattcaaaatgctgaggctaatatatcgtttactatcatgtaggcgaggtttttcttccagcaactcatttcaggagttagttactgtcatgctatggtaatgaaaaatgctctctatcaaatcaatgcttcatcctctgtgaaattcagctgacttaagaagttaaattttatgttgtagcaagtatgtcaccgagacttaaagctcgagaatacgttattagatggtagcccggcccctcgtctaaagatatgtgatttcggatattctaaggtatctttgaaaacatttcagaaactctgagttagttagtatctctaagctttgtgttttctttttcagtcatcagtgttacattcgcaaccaaaatcaactgttggaactcctgcttacatcgctcctgaggttttactaaagaaagaatatgatggaaaggtactccattttcatagttcccaaactagtatgataaccatatcttatagaaagaacaatctttgtatttttatcctctgattatagataggggaaacatgctttctcttgatgaaagctcacacaaataaaacaatcttggctcttcaagaattttggtgaagaaagctattaagagtctgatttgtaaactgataattcttgagttttggttgaattagtcaaatgcatcctaatgttcttcttttttttcaggttgcagatgtttggtcttgtggggttactctgtatgtcatgctggttggagcatatcctttcgaagatcccgaggaaccaaagaatttcaggaaaactatacatgtgagcctttcactttcttcatgcttcaatagttgaaaaatgtaattatggattttattacttgctagctaaactatctgttctcttgtgaaaatatttgctcagagaatcctgaatgttcagtatgctattccggattatgttcacatatctcctgaatgtcgccatttgatctccagaatatttgttgctgaccctgcaaaggtaaaggaaggatcatgaaagctgcatttgttgatttatttgtgaattttctttatagtatgactgaaaagagaactttgcattttggccctcttggttggtttcttggcagaggatatcaattcctgaaataaggaaccatgaatggtttctaaagaatctaccggcagatctaatgaacgataacacgatgaccactcagtttgatgaatcggatcaaccgggccaaagcatagaagaaattatgcagatcattgcagaagcaactgttcctcctgcaggcactcagaatctgaaccattacctcacaggtgagacaacacaaaacataaacttttcgatttcttgtcttttttaatgcttctcaatgtttgaaaaacttatcattaatggataaacaggaagcttggacatagatgacgatatggaggaagacttagagagcgaccttgatgatcttgacatcgacagtagcggagagattgtgtacgcaatgtgatactatatatctatttgcatggtttctgctacaaaaatgtcaaacaaaaaatgttgaagaataagattaagatgttttgcttgctattgagttggcccaactttgtctcaatgagtacactttgaatctttgatatgcaaaagactaaatttctaaacaaaagtgaaaaaaaaaaaaaaaaacattttcatcaatcagtattttatctactctctctagtattttttgtttgtttttctaataatactagaaacaaaattgttaaactaatttggagaagttgacaactaaacaacatataggctatgcaaaagataaagaaatcgatattctgtagtactatacagattaaagtgggtacttgataatatcaaactgaagtaaatagatggggcatatcttgaagacttgaactatatggaaataagatgatattcccattttcacaaaaaatacaaaaacagcataaatgtagatggaacacattcattaataatttaatatgcatgttatatgttcagaaggacatacgtacggtaattcgctttaaattaaaaaagatgcttattcacgcatcttcgttttttttcttttctaaatatttttcgaataataaattgataatgaaccagtacttgatagttgttcttgttcattgaaattaatattattcctactttaaaaaatactcaatgtttttaatttttttaaaaaaaggaagaagaaaacaagcagttacaatttgcaacgtttttattaagaaaatggaagcatgcatggttggtcgacctatgtgacagtgtctcttgtactgtaacacaacgtgaatgattttgagttatagatgagatatgtctgccttagcaactgatatcattattgtcttcttatcttcgttattttcttttagtttcaaactattttgtaccatttattttacctattcactctggatataggcatagtggataaataacattattagtattttttaaaataaattctattttggattgggaaaaatattactgacacaatatggctttggccgatagacaggagatatgaacgattttgacaagatttccaaagaccgttgtggtttatgtttctatttatgtttttatactttcactacgaaattttatacaatttcaacggaatttagttttttgggtaaaattatgacaaatatgtgtcggatttagcgaaagcataatttttgttgtctcaatgtgaaaaagatttacagaaaaatttgaaataaaaacttgtaccaaaataatcatataaatccattgtaatttccgatagattgatttgtcactaaaataaaagtaatcatcaagtatgatctcctcattgccgtcagacttgtccaacggtagccttttttgccattgcagagttgctcattatttccgttccgacacttaatcaagtaaattctgattgttatttgttagtttctgcatccagatggtgatattcataacaatcaagtacattattaacttgttttttttgataaaaaaataattgactagagtagtttgaaaatgactaattatttatggtgtgacattggcttattcgacatagtgtggggactggggagggatctctattatgaggattcgaccatttgtcttgctggtgagtgtttccatacgaaaacgattttcgacaagctaatgtagacctaattcagttcatgttacattctttttattttggtatgttaaatcgaatcctaaactaatatatcctttcaaagtagttgaatttggctttaactttccagtttgtctgacaagtatatttcactcaagctaagtcaagtgtaatcatatttttggtgagataatatttcttatagttgagacgaaaacctatatatagttgagacgatgattgttttctaattagttgaaagttgaaaccacttcttttcacaaaaataacccaatgcacttatttgaatctttagaatgatatacatcgaatatctatgattggaaataaaagtcagtgtaagaacttgaaaggtgtttttaacaagaaaaaaaaaaaagaacttgaaagtgaaaaacattaataataagaggaaaaaaggtgaaaacattaaagtgcccatagaaaagttgaaaaacattattaaataccaaagaaaaaagtgaaaaaattataaaattataaactcagaattagggtgtgaattcagattaccccaaatgcacacatctctcgttttactggatattgtcggtcgtgtggaggagatagatagagagtcccgcgtgagttaaaagaatttcgtcctttgggacgtccaaaagccacacgctccgagaaacagtttttttttttttttaccaaaatgattaatgtgtaattgtggaaatttacttttttgggagaatatgactagctaatttatcacacattcaaatttgtcacgtaccgaaaaaataaaattcccatcagaatttttgttattcatttttaatccaatctgaaagcagaaataaaaaggaacaaaatttatcttatgttcattttttttctctttccttcctaatttttcattttttttcttagtctccaaaaaatataaaaataagtaaataaattgaaaactcatttggagtggggaccgcatcaatgataaatacaaggaatgatgaagtgagagttaaagaaaatcaagatattaaaaaaaaaacagagaaaaatggtgataaaaaggatagagctgtgtatagagctaatgaagataggtatggagtttgtagtggtggtggctgaagccgtccagattgttatgcggcaacacctcaaccaccgtgctccacctcctccgcctgtcctccgccagggtcttctcccttataccgcttcttacccttctccattcctatttggatttctcccttgaatacctttttcttgttatgaaattattctgcttcttttcttcttctttttttttgttctctgtgtagatatttagatcttattcttcttaattcttgtaactctgtatattgcttaatttcttcaaccagatttgcagctctcttacaatttttaataatcaagtgaacaatttggttgaagaatacgacgtgtagcggaaataatctgcccctaagtccaggttcaactaaaaaaattgttggttttgccatgtttcttcatgatgatattttagtacttcacgtcaagttgttcaattaattctttatacaaaaaagatgatttaattaattattatatcataatcttgattagtcttggagagatgccttggtgtgctaggtttgaacatgggtcgttatatcggttaatgtatactgtctccatagtgagtaatttggcagtagcgcaattgacttatcttggggttaatcctagtcaaaaatatctccttcaaatctccacagttttattaagatatttcttctatatataagagtttcccaaaaatatatatatatatatatatataagaaacatgtatgttttttgttcgtatacttcttgcattatcataatctgtttttttttttcaaccttcattatcatggtacatatccctttcaccgtggcccgtgagaaaatatgtatgtttattgcatatatgtccaagttcatcgaatatttagtttttcacggtatggttgaaaaactaaataatcggcatttggaattggagtgttttagttaagagttaacggttttgtcttgtacacgttaaataccaagagctggtcagatgggaacagactcaattatttgaagttgggagaggagatgttacataaacttaatcaatgcagttgtaatgtctttctcaactaattacattatcttttttgctgcgaaacattaaattttagttgagagtgtacatgagactcctatattaaaatgagttattggtttacgagttgactctgctaacattaatcggatcagattgacaatttaatatatatacagacatgtaaaacgttaaatataactaatcaccgttggaacattatagaacatacataagagactgactgactgagtaatttaagattcttcaaaaaaaaaaagcgtctataacttcttcttttttggtatcaagtgcgtctataactcgccattacgaaattgtgcatactaataactcatctatgtgtgtctacatatttcctgagaatattacttttatatttcgcgagtcacgtaaaaaaacatctcacattaatgaattagttggctagcagtatacaaaacatttatgtcgttatcaattacaatattttttgttcatgtttcccgagaataattgttgaaattaacacaggaagaaacattattaatatggagtattaaaagtgttgcgaatgaaatacctaggctaagcaggtcaaaatgtaatgtcatagctattattatatgttatagtaatatatatatagtcttaattgaatttagttctgcttaaaaataatttagttatagacgcgaagtcatatctgcaattccaaaagaagacggcaatgcaatattaatgacggtgaacatggatgagaaatgaggctgattcagttttgacataaaagacaaaatagctctatccatgctcttttttttttgtcggatccatgcccttttcaataataagggataacaattttattctattttaaatgggcttactattgaattgcatgagtcacaaaagtttacacaagcccattattaggcccaataataacaagttcataattagataatgggctagataatttctaaggtcttttttaggaattgcaaggtttcaatatcaattagaggttttagaagaagagagtataattgtgaaaaaaaaaaagaagaagagagtataaatcttgatcgaccataataagaagtttgtaatgtacaaatttatacgacctcatgtaacaattcattacccttcaaattttcttcttctttgttttttggatatagcaaatttgttcttttctcatcttcttcctcgaattttgttctttttcatagttttactacaattagtccaagacgatgcagttgctactcatatatagaattcttctctcttcgattgagatcattagtagcctgcgaacattggcggtggtggtgatgcgtattggtggccgatgaacggtggtatgatgaattcatcgtcacttggagctggtgcatgagccggaggggtctctttcttttccaccggtgctggcggtggtgattggactggtggggagttgatcttgggcggtcttggcggaggagagtagactactggtggagattgcgacggcggtggagaaaagaccggtggtggcggtgaataaacaggtggtggtggcggtggggaatgaaccggtggaggcggtgagtgaacaggtgctggcggcggcggcgaatggactgggggaggcggtgagtggactgggggaggcggggaatagactggaggtggtggtgaaaagacaggcggtggaggagagtggacaggtgggggtgggggcggaggcgaatacaccggtggtggtggaggagagtggactggcggcgggggagagtgaacgggtggaggaggaggtggtggggagtaaactggtggtggtggagagttgaccggagccggaggagggctgcgccttttcgtcactggagattgatcgtaaggatcatctggttgaggtgactcttttggtggttgtggtttttgaaccggccgagatggaactggcgatggtttgtcaaccggcgtagctaaaactggcgatggttcgtgaacaggggttgttggaactggcgatggtttttgaaccggtgtagttggaactggcgatggtttttgaaccggcgtagttggaactggtgttggtttgtgaaccggcgtagttggaactggcgttggtttgtgaaccggtgatggtttcgatggagtagaagagccaccagcgcacttgtccttgctacaatcaaccgggcggttgatcacaaccgcacattcttgggcggatcgttgctcaggtcgagaagccaagcaattgcgtgtgtcatccaacgcaatctccttgcgactaccacctggaacacaagaacctccttgtccactgaagtaattgtaagaataagtcaagttcaccaaattaggcaactggcaaatgttatgcggtacaagtccggtgagtttgttcccggagatatcaatttcctccacgctcgttaacccgacaaagctagtcgggagacgacctatgaacgagttcttgcttgcatcgaaaaccgttacattcgataactttccgatttcagatgggaaacaacctcctaaatcattgtccataaagacaatctcgttgagattcttcatgtttccgatactcttagggatacatccggtgaatttattgttagcaaaagtcacaaccgaggccggagattcccctagagattcaggaatcaccgaggtgaatctattgtcgttcaagaaaatggcgtcaagttctttcttgaaaagctcaggagggacttgaccttcgaaatcgttgaacctaaggtcgaagtatttgacatcaggccaagagagaacgacgttagggaaaggtccaacgaaacggttgttactaacatcgaattcgtgcattagctttagcttctcaaagcttttaggtatgatcccacaaaaccggtttgaattcaaatggaacattgcaacatctgtcatcaaaccaagctcagcaggcaaatgccctgcgatatccgcaccgttgaggtcaacaccagctacaaccgtgacatcggaatcatcaagagctggcgcacaaaccacaccggtgtagccgcacacgtgtgggccatgccagttccccgtggtgttaaatgggtctgaaaatatggcctttttccaagcctgaagagctatataagctctcttaagcctggtgttggcaaaggtagccttgagatcaacctcgtattcgatatcatcaggaagttcgccgttgtctggtaacgttaaaagttgtcgctgcacaatgaaggcagcttctgtatcggttagggcaaatgagacaaaggaagaagataagaaggagaagaataagaggaagaagcagcagccaaaggacggaggtttagccatggctaaaacaaaaaccttggaaaagacccaaggctgcttatagaagggcatgagagggttcaaggacacaaaggtgtattattaataagccaacggttttcattttgcaatcaccaacggtttcccttaacatactttgtctataattagggacaactcttgtttttaaggattttgcttcagatccagaggatatattatcaagaatagaaattgtggttaaagaaaacaagagagctaaagcagaatctctaaaatcaaaaccggtcactattataggacacagccttgaaaacgagtggttgttgattcattaccgaacatcacgcaatgacagaaaccctatttgtctcactatttcacgtgtgctgcaagatacctccctaaggtattagattacaatgtttgtatgcaaattcaaaggagtcaagaaacaaacgatggtaaatccattgtttcttcacatgatcctcaaaagatgatctacctagctttctgatatacaatctcttctctgcttcaattcccttaaacaattgactatttcttatttcctttacttacaagctcattgatcagtcacatcaacctaatcgagttccaagatccttatgatcctcttaaatatatgtatggatgctcatagactatgaaacctcgcaaaacagttaaaaataggtccgctaatacagatcctcaggcacatcctacatgtcaataagtttcactctcttgcataaaacgtgaatcagattgataatcgaactcaccattggtaaaaacgttatattttactacaagacaacaattgtgtaccatgtttctaaattgaatttctcttaaaagtcgcatgaaaacaaaaattatttactaataaaagaaattctaaaattcataaaaaaaaacattgttcaaaaaataaagacataagtatagtagatagatgttatatgaattcaaaagaataaaattgccataagatgctaatactatcagataacttttcccctagttaacattagacaaaatttaacgaaaacaaacaccaatcctatttccatatcccattggatccctttataaggaaggctctctttagcctcacgctatacaacaaacaaaaccctctccacattcgtaaccacaccttcttctatttctttatctctattcatagtatttcatctacacttcctaatgctttcacgttctgggcttcaccatccttaccggcacaacctgagaatatgtagcagcctctttagcaaaacttcaccagtagaagtgaaattgtttcgtatttgttctttatctatatttacctgatcctccttcaatgaactatcatcgttatttgcttctctttctcgttttttgctcacctctcccttctcttcttcttcttcttcttctctgaaattctgccctgacgcctctgtagatatacaagaaaaaccaatggacgtcagagtttagactttagacttaacataatttactacgatccatcaggcagacgatcacacaagttctaacaaaagatattcatgtgtggtcgggtgatcaatagacagcagaccagatctcatacatgtccttcatttctctgaatctcctcaagtcatatcaactctatgtttatgcagcaaagacttataaatccagtgcagtgttgactcaaggacatatttaatcaaaaatttcagtctagtatagtctaattgggtaccaaaaaccagaagaagaaaaaagacaaaaaaagggaagatgccaagaggatttagattaaactaggctaagcaaatgttacctgagtgtttggtttcgtcatgacataacacatctccttggacagtagttcccatggtgtaatttccgttggaattttcaggcttatttctcaatgaatttctgtgaaaacgaaactcagatgaagtctccaaacaagattgtttctttccaaagttaaccttctgccagcaaccattttgtaggacggtaaactgcaaacaaggatgttgtaagttccactaaaagattaacaaactaaatgagttcacagaagaaacagtaagtaaccccgaacctgatcagctgatttatgagagttagactgcacatcacgagttctagaaagtctctgagtcccacctccaagcaaggagtataattgcctaacaaacgagctctctaaataatcaagatatgagttgtgtttctcattcgtccaagcagtacattcatcctgcagaaacaaacaataaactttaggcaggaagaattcaataagactataaagagtgggacttttgtcaagaaaataaaccatcacaacacgatcacgaactctaatcactcgaaaactagtgtaaagctaggatttttcgattttgaccattggaatggttttgattgatacaggtcaaggattgttagttaatagatctcaagatcatcaggcatcaaattgcctcggcgtccaagacttgttgaacaatcgaaatcttctgctaataagggcaaggaaaaagaaacccaaacaatctcatttagttggacggtcagatttgcttgaagaagacaatttttcgacatttggtagaatcagagatgattaaaattaccaaatcaaaacaaaattaatgagtatgctcctatactcatatagaaacagatctaaagctaacataaattagtttccaaatcgataagaacaaacaaagtaaaccagaagatattttttccctctttaactttgcctttggattacgaaaatatctaaaatcacgattcgacaaggaaccaaaaaaaaaaaaaagagatttttattctctcatacacgaatcaagttcatattcgacgaatctcctacatatcgaaccaaaaaaaactatcaaacgagacatggtaaataaacaaattgcgagaggaagatttgatatgataccagtttggaatcagcatcagaacgagaggtctcagccgtaacaccggaatcgagcgagttcgaaagagtcgactcgctctgagattcagccgacgcctccgaaacatcgcgatccttctccagagagacaatattcaccgtgcaatcattctccatcgttgcttctcctcctctccggtgctttagaaaagaactgcgtcgtctctcttaggaaataaaaatggttcttcttcgaaagagccaaagaagagagctttaagagagagaggaatgagagaagaaggagatgaaaaggaaaaaaagagagagacaaaaggtccacatggcgtcgcttttacacgtgtcatagtattgccacgtcatctgggtcgctaataatatctccgacaaatatcagccagatatttttttttggagctcaaggagaagggaggttgtgttaaataaaaataaaaatgatcttttcttttgtcaacttctgatgatatatagataatggatgctcttttttattttggtagttttggtttcttgtcttttatgtcattatttcgttgttttttttttgacttgtagattttttataagttaaattaagatcagatttacacgaggcctctttagcaagtggtatgatcacatgaatatttttttgttttttttttttgtaaagaaagaccagaattcgtgtgagcctctctagggtttggtcttacattttctagaatatacatatatatggatgatggatcaaattggcttcatacggattttgtaacaaattttattaaagaatgatggatgcttacaaatttcagagttttaaggttaagtacatccttccttatcagtgaattattggagatgagacaacttcgtcagctcaaacataagagattctcgagaaaatgtatttaacattagttggtcaagcacgcaatatactcgtcacaaattatgtaggttaagttataaaatggatagaatgaagaagagtctgaagatgcggtctcaacatgatatagtttacttcacgtgtcatttttgtcacaattgccactatttaactaaaaagtacaagtaatatgaaaaatgaaaatgaaatgcaaacatgttaagctaatttttatggtcaaattatgagtttttttcctcattttcttccaatgcagatggtacaaaccatggtatctggataattttgtaacatctctaatattatttttgtcaactcgaattaaagagaaaaaaacaacaaaaaaatattaataaaacagttacttaactttcattaaatatcatttgaatttggataatgagattagtccaagagaaattaagtatcattatctaaaatataaaatgttgataggataaattcgaataaacaactaattaaaaaattagccattggtttcgcaaatatccatttgcgctaagagacattttgctgacgtgggacagtggttgcttcaaaatatctgccgcttcgttcgttacaaacgaaaatatctgcccttttctttttacaacctaaaacaaaatatctcgcggataataatagttttctaatgtagaccacttcttcatatcctaatgtagaccactttgctaatggttggatgaaatgtattatctttttataatcatatagactccatctttagagatatgtacaaatccatcgagattttctttttgagatcctcctttcttgaactctatataaattttgtacattcttatgaatgataatcataatataaaaatttacaagttctgtagtagaatcagagtctatatgaaaaagaaaagaaaaaaaactaaagatagatcgattttccaaagtttggaaataattatattgcctccaccgtcaccaaccgcggattctctcatttcggtgaacatgtcaaacatcaaccaattagcaataattaatcatctcatgtggagccaattaataaatatcaataatctcatgtggagccaattatgtttttctagattctctattttagtctttaggtataacatatatgtgtacatgtccatcgagatcattctccttaaagtcttcctatctccttaaagtcttcctatgtacattgttacgaataatatacaactctataagctcttgatagctattacaacatacgacattattgttataatacagccatattgatataaatttttttattttttttgtaatcctatggggctatgtgcctatgcctaaatcctaatgcatatatctagttggggtagagtaaatgatgtatatgtatataagtagattactggttttttcttctctgcagtctaacactaacaatgttctggtgggtttgaatctcttaacaaagatgtttttcttaaaatcctatgttctggaatgttgttaaacctagctaacattatctaattcctttaaaaatgtgatatctactcactcgtacgtatacatgcatgaccaaatttcacgtaatcttgtttgtggatattgatttttttttttttttttttgtgtgtgtgtaccccctgtttttttctttcttaaatctgttcaatataaaattgcaagacatgtcaattgacttgaaaacggttaaccatgatatttgtacgtcattgttctagaaaggatcatttgaactttttttataccatgttttgggaatattactagtaaataaattaagcatgacatcctcatcgtataatccttgtagttgtaagtttttgcactgtgtacacacacaggttccatttttctcgttttgcttaatctccagttaataatttgagacatatttgtcatgtcttctatctgcgactatttttggtttgttacgtctcgacttttcgtctttagtcatagtaatgctaccattttgtgaacttcatgaaagagcaaaccaaccgcccacatatacaactggtcaccgcaatacataatgacatcataactgaaacacttagcaacataattgtaatacttgcttgatagcttgacataacaaaaagaactaagaagtgctcatacttgtacttttggaacatcattgtaatacttgaatatacacatcctaaacctctcacgatggttacataaatttgacgcgtacactctagtgatatgattcatatcatcatatccttagttaagagtacaattctttcgaccaattcccaaagaagccatagaactaacttaatcggttctcgccatataaacaaataaacactacgaagttacaaacacacacacactaaataaaagaaagcaaagaacaatgactgaaaatcacattaagaagaatgaaattataatatttttgtttggttaaccattagattcaaaatttgaatattctaaattcgcatctattttacaaaactgtcattcctctgtacatcacatcagaacaaacaataatttctcaagaggtaattataaaaaaattaaagggattattatccttaatcatcatgattcaaacatcaattcggttcgccggagaattgcttcaccgaacaagcaaccacctgagcccattgcttcaacctcagcttcatcgtctccggatcatcaccttttcaatttcaattctccaccgtcagattttttaaaaaacacaaatactaagaaaataaagaggaatcagaaaattcaaaattcacataccttgatcaacgatcgtcgtgctggaattgctgttttcaccttccgatgcgatcgacgaaagagacgaagtccgtgacaatctgctactatactgtttattgacggcgcagtataaaccaagagctggaagagtttccgagagcctcggatctaaatcaggcgaatccggctcgaatccaaatccaagctcgatgcatcccttgagctcttctagatcttcgtccgtcacgctcttactccgaccgagtcggcccaatgattgcttccccttctttcgaagccaagcttcttctcgatccgcgtccggtgaccatgaatgttgttttactagcggtctaggcggtgcttgaaacggcgcgttgcgttttgacattatggtttgtgtttgtggagttaatcgctcttccttcgtttgtgttttaatttcatactaaaaaaacgcgtgaagagcacttcgaatctttatatacacgtatttaatttactcaatcaccaaaaatgttaaaattctaaaagtgccctaaactttataccatattttcagatttcttttaacttttagtttgactaaaattgttagcatgtgtttgagatatataactattttttaatcataaatgggaatatttccctgatatttgaatttgaattattatttacctttttaccagcaacgaagcaatacattttacttagttagatgtcatcatgatgtctaggtaaataaaattgttacatttatattcactaacttctgcaaatatatatttatgctaaaacagaagaaataaaaagatgaggaccaaatcagaaacattcacagattctgtgtatcaatttataaaaataaaatacttacatagtagaatcaaatagtgacatcgttgaccgcggcagaagaagtaaaaatggaagttaccagagaaagaaagagactctgacaaaaataaccaatttgggtcaactggttccggtccacagctggtaacattttttaacaaacgtggccattaaactaacataatactaatgttttctcatactcttctctatcaataattataattattggggttggtgtagttgaaattatacaaattcaataaaaacgattggagttgtcatgttcatttctactaaaataataaagtcgtgttattatttcaagaagaaaatcgattacattcgaatataaatcattggatgtttcattaaacgattaccaccagcttcgatgtgtgtttatgtaattattacctccgacaaactaattaaaaaaagactgattacattgtttcaactaaattgtttactctcaaaaagatattttcttttaaagaggaaaaacaaagttccttcttttaggtaacttaataaactattataaccaaacgttgaggattcaacgattgaaaccgttcacacgtctcgtcctttgcgagtgactttctgctaaagtaaaccacaagctgtccacatgactacgacaggctgtgtccatggcggaaataaagaagctttctttgttgcgacttaaccttcgtaagcaaagttggaatctttttcccacccaaagtcttcctagaccatgattaaccggttcacaattgaattggaaccggtttttggatattgactaatcggttttctatgccgtcaccagtaatcaccgcaagagcagactccattcttgaaatgatgaaaccggtttgaatccctcacaatgatctctctctcagtgattttcgatatgaacttggttacgctatggcaatcgccgcatacccttagattcttaaaaatccgaatcgttgtctttgcaggagtggcgataagtgcaaatgcaatagctaatctttcactatgactcatgaggatatgctctttctcgtcgtcttcaacatcctgcaacacaaatctatggtccggtacatacccaatcatcttcagtttcgcttgtaatgccgttaattctctgtacatctcttcatacattggatgcgtttggtttcccgtgtaaaagacttcgactttgttgtctacttccattgagctccaacccggtgtcttcctcaaacctttgccatgggctattgaacgtatttcatcaactccttcccattttccagcactagcatacatgtttgacaatagaacatgatacccgacatgctcaggttcaacctcgaacaaatgttcagatgcgatcttgccaagatcaacattcccatggactctacaagcgctgagaagagctccccaaatggatgcatcaggctgaagcgacatactttttataaacttcaacgcggtttctaactgaccagctcgaccatacatatctaccatacaaccgtaatgtttcaagctcggtgttatcccataatccgtttgcatcatctcaaagcaccattgaccctcgtctactaacccagaatggctacaagccgataacagagtcacaaatgtaatgtgatctggcttcactccttcatccagcatttctttgaacagcatcactgctttctcgccatgcccgtgaaacccgtgacacgctattagggtgttccatggcacagagttgactcttgggatttgataaaacaaagagagggcatcctctagtcgtccacactttccatacatatcagcaaggcttgtaacaacaaaaacatccaaataaagaccgttcttcaagagacggccatggagtttcataccttgacgcaacgctccagcctgcgaacaagcgggcaaaacactcacccaagtcccttggttagcggctatttcaccttcttcctccattatgttatacatttcaattgcttcactagcaaaaccgttttgagcataacccgagattatggtattccatgaaataacatctgtattcggaagccaattaaacactgctcttgctgaatctacaaggcctagttttgcatacataaccacaacagcattcccgatggtaatatcttccaagaaccagcctttcctcaaagtgaaaccctgcacagatctacaagcacgaatgtcccctaactgtgatagtatagaagccaaactaatcaaagtaaggcaatctggttgaattctactcaaccgcatctcctgaaacaacgaaatcgctctaagcggctgctcattcagctcgtacgccttaattatcgaattccaagaaatcaaatccctcacatacatcctatcaaaaaccttctggcaatccctaagcctaccaaattcagcatacaaatcaatcagcttgttggaaacaaacaattcggactccagaccatgttttatcgagtatgaatgaatagtaactcctctattgaaatcaccggcttcagtgcaagccgaaaggagactcacaacggtaactgaatccatagctctcaacccattagacagagttaacgcctctttagcatttccgctttgacaatacccagaaatcattgcattccaagaacccatatctcttacaggcatttcatcaaacagtatacgtgcattccccacagctttatatcgagagtacaaatgaatcaacgaggcagcaacatagacatcccacataaacccaaacttcaaagccaagcaatgaatcttattcccatcaatcacagtcctacaagctttcaaaaccgaaggaaaagtcctgtaatcaggtgtaagtccagaactcaacataaagagactaaaacacctaatcacttctgaagaatttcccgcacggccataaccagaaatcatcaaattccaagcgtatacatctctgttctggatatgatcaaacgtgtgcctagccaatgcgacattgccaaggtaacaatagagattaacaagtttagcagagatacaaacattttggatttgtttggagacaacgagacgtgcgtggagacatttggctgattgcaaattagtgcaatatctgaaaagtgtgtgaacatcatcaatctctttactttcattcccatttttccaacagtcttgcaaagcatttgcagatgctgaaaattctctaataactgatccgatagattgcaaaactcgtgtaaagcgcccacctttgcaggttggaatttgtctgggaagtgaaaaggttccaaatttcatcaaattttcgagggaagaagagaaatactcagagaaaatctatacatttatatatatacctcaacatacatgcaattcaggtgtcttgaaaactttcgacgattcccaccaaaaggtttcggttagcttagagaagtagagatgagagactaaaagagatggtataatcgggttggtgattttcgacggtgaattgaagagtccgccggagggtttagcgacggccgtcagcttttcttctttgattgcggtttgtaatttaattgaacccggtttggttttgtaaaccgtgcggtctaaagcactaaactttaagacgagtaagattagagcccaataaggcccaaatagtttggtagcttggttaagcccaaatatatagccgttggctagacgcctagacggagttttttgtactgaccaatagagaatggcttgcaagagggaaacacatgatctgaaccaaaagtatgtttgtttgtacacttgaagcgtatttttagcatacgtttgctcaagcagggccaataattgacaataaaaccttcgatccacgtgatttggattgcgtgttaagaggtgcaaaacaaatcttcgtgctcacattattcgggctattcacttcacatgcatttgactatgacaaatgacaatagttctttttaaaaaacaaatcaaaggaataatacgtttattagacttcacaatcttgctataatggtccctcttcaaagcttagagaatttgtaagataacaaattaagattgattgtatttgggtaataatgactacctctttttggctttttcatttatataaatacttggagttcacctccttacaacaacttgaaacaaatcatggagcttaactcctacaaacatggaatcatggaaaagtgactttagtggaatactccacattattagcaatgaaacagaaatgcgagagacttagtcaagtcatgaccaagtccttaatcgtatcttggattgggcttgcgcagacgtttgggccgaacgttgatgttgggctgaatgtcctcatcatgctatgcctcataactcattcctcaaagctttcttctaatcataatttatttgttttttgtttttttaatttgcatcgtgaggtcttctttttgatccaatcaatggacctctttctaagagttcaactactcttaacaactttaggtcttctagacacatagaaagtaataaatatatatgggcatgacactaaggtttcattctttttctttattgtggtttaggtttttgatctaattttgttattgtaagaattattttgtaattttgttattatcttaccatggaattaagaaaaagtaaatttcttcaaacttaccctgttgttgcaacttacatattaaactctctcttttttgttaaaaaaaggttatatatcttttaaccttctaggattttagcctagctgaaaaaaagttacacattaaacttgtttttgttaacaacgttttagcatttcggttgtgtgttgtttcttccggttgttatagtttcgtactttcgttggttttgagttttggattcttgaaaggtggttataatttatacattttgtttctacacgaccttaaagaagtaacttcaattaattaaatctaattcgggaaagagcacgtctcaaaagagtcgtcgagtcccatgtgaattctatatgataacattaaacaaaatcacggttccatatttgtttaatactagtatgtattgcagagtagactttcctaatccagtagattcttaaagaaaaaataatataaaaagattgaaaatagaaataaaagatgggagacacgaagggtcacttgtattgtaccgagtccaaatgtaaagaagtctcaataatggtgtaataaaataaagaagttgaagacaagatcacaatcaccatgtgaagatcaacacacaagatcataattttattgtatgtttgcttcatttcaacttttttaaatattgttaagagggcaggcattgagtgcgccacgtggcaaatgaccatccctttgtaggtgcagcaaacgtgataaagattccggactgttcacccattcccttcttccatttgtttcttattttttcttacaaatcttatcgtatcataattttttttccataatgcgctcccttgaatggaataacgttggttattttgtttccaaccaaattttcataccattcgatcaaataggtgcatcaacttacaagaaatgaaagtgtgatccctattttattaggtagctaagtaagtgttagtgaacactacgttagattgttactcaaataacggatcaacgaatctcgtattcattactatactgctaatgaatgcatcaattttaatttttattggttatctatccttaaaaaaaagttataagaatattttgataatttgttccaagatgtagtactagtagtagtacttggtctcgtaaacgacgacgccgtttaggaaatcaaacggccaaaaatgcttccactttgcgaaattttattggtgggaaacgcaaatgtatcgataatgatttaaagaaaaagcggcgtttctaattggaccacgttgcccaatctctacggctcacgcacgatctgacgtcaaattggcataatactataataaccttatcgagaataaaataatagtcgcatccaaacaaaagaaaccaacccttttatatcacgacgagtgtcacgccatggacacttgtccatctctctcgctctgacccctttcaggtatcttttatttctcaaagaggaattattgattttccatttccaaagaaaaaaaataaattcgaaggtcaggaaaattaacaaaaaacttcctttttttttttgttagtttgtgtgactgagctgcttcattttttttctttctttttttttttggtttgatgaatcgatttttgttgtctattactgattggttttcttgttcagattcactgattcgaagagaatcatgatttttttttcccgctgaataataagcatatgattgggtgttttggagatttgtttactgattaaaaggagattcctttccattttcaccatttgctctgtttgacttcattgtgcttatatttcatttagatcttttgtttgggtttagctttggaactgataaaaatctgattttgtctcacggctttggatttggttcttaaattttggtactttaaaactggataaagatcagtgcttttttagattcttcgtttgttgatgaatttatggatgtatgtataattaaaccataatctctctgcttgtttgttttcttataggtaaatatccagaagcttgatcctcctagttgtacgaaagcttgagtaatggggtctagattaaacttcaagagctttgttgatggtgtgagtgagcagcagccaacggtggggactagtcttccattgactaggcagaactctgtgttctcgttaacctttgatgagtttcagaactcatggggtggtggaattgggaaagattttgggtctatgaacatggatgagctcttgaagaacatttggactgcagaggaaagtcattcaatgatgggaaacaataccagttacaccaacatcagcaatggtaatagtggaaacactgttattaacggcggtggtaacaacattggtgggttagctgttggtgtgggaggagaaagtggtggttttttcactggtgggagtttgcagagacaaggttcacttaccttgcctcggacgattagtcagaaaagggttgatgatgtctggaaggagctgatgaaggaggatgacattggaaatggtgttgttaatggtgggacaagcggaattccgcagaggcaacaaacgctgggagagatgactttggaggagtttttggtcagggctggtgtggttagggaagaacctcaaccggtggagagtgtaactaacttcaatggcggattctatggatttggcagtaatggaggtcttgggacagctagtaatgggtttgttgcaaaccaacctcaagatttgtcaggaaatggagtagcggtgagacaggatctgctgactgctcaaactcagccactacagatgcagcagccacagatggtgcagcagccacagatggtgcagcagccgcaacaactgatacagacgcaggagaggccttttcccaaacagaccactatagcattttccaacactgttgatgtggttaaccgttctcaacctgcaacacaggtgactaaagaacctaagctactacattttgtaggaaatacaatcatctgaaaaatattagacgtagccttcatgttttaagataagctggttttggatatgcatgtatgtttcagttatctgagcatgacttgtttttacttttttcgcagtgccaggaagtgaagccttcaatacttggaattcataaccatcctatgaacaacaatctactgcaagctgtcgattttaaaacaggagtaacggttgcagcagtatctcctggaagccagatgtcacctgatctgactccaaagagcgccctggatgcatctttgtcccctgttccttacatgtttgggcgagtgagaaaaacaggtgcagttctggagaaagtgattgagagaaggcaaaaaaggatgataaagaatagggaatcagctgcaagatcccgcgctcgcaagcaagtgagtgtttgtttaaattttggagattaaagaaaccttaaaactgtgaccatgttatttactttttcactttcttgcttgacaggcttatacgatggaactggaagcagaaattgcgcaactcaaagaattgaatgaagagttgcagaagaaacaagtgtgtctcgcttcttccctatcacaattaagaatctcgagattttcatattttcttgaggttgtattcactgaccaaatgtttcatgcaggttgaaatcatggaaaagcagaaaaatcaggtactgtcttgatttgaatatcctctatggttgttggctaggcttttaactctcactcataatgaattacacttttggacagtattctaagcttttgagtagaatagtgtaagctataccatgaagtgagacatatcatcacatttttgatttcccactctgcataaagtatttaagatttgtgaatatgttgcaatgccaatttggatatttcatgagactaatctgacgagcatggatttaacggaagttggctcatttgttgttgcagcttctggagcctctgcgccagccatggggaatgggatgcaaaaggcaatgcttgcgaaggacattgacgggtccctggtagagcttataatggcgtctaaggaacccaacaaagcgccgaagttatagaacaactcagaagatagaaagctagctttgtacgtagtttaggcaggttctgtgggtgattgtaaatcttgaagtgtggcggatttgacagagatagataaacacatatctgttctattttcctaaatcttttggttttatcttcctgatgtaatggatctttatcatttgtcttgaacatctttgtgacttaaccagagtgaatttatcttgtatcttgtctgcaattttttctttagctcatttgggcccaagtcaacacctttattatagaagagagtaaacatcaagtttagcatcaacatctggtaatccaactgggcgtacaaaattagatacacatactaaattggcaaaattcttgcagatagcatcccgcttcaggataaggtgcatcaacgttgaacagatgatacttgtgaaaagtctctggagttgaggtggtttgataccatcggaccgttatacttcggtttaagatcagtaatgagacatcttctaactgtgtttcttgaacaagatgctttcaaacggttactgccttggatactcatgcacaagcccttctgaaacactccttgctctagcatgtccgaacagcttgctaacaatagccagggaaaatttggtaacagttgcgagccccaaacttgtaatcacgtttccatctataacaacttcggctccttcgatcatttgttgattcataggctcgtctgactctgaaggatacacagtcgttctcttctcctaaaataggattccaattgtttatggcgtttgtccatgtatatgacaaagaaaagaacaatagttgtcttcaccttaccttgagtaaaccatgtttatgcaaaacggtagatgaagagttggtagctccatatattcgcccagattcatgttgttccctgagcagtttcttgagaattttggacttctgcagacgttctgagccagtatggcctcccttgggaatttccatcaaagaaaagaaatcatattactcaccatggaacaaccaacagttgtagtttgtctaaaagcttttcctaagcgcattgatttgacatggcatataagttatactgaaacatgtacatagcaagatttatttaagaagaagtaaactagcgaaatggtatgagtttattatgagactaggacatgcagggttttgcttaaagccttaccggaagaatgattagatcatatgatgactcagcagcttcaccaatcaatttgtcagtgataattttggtgccttggaatgccgtaatccgcaaagatcgttcaactgatgaaaccgtgacatctactttggctcttctaagaacatctgcaattgagaccagttcaaccgcttcagacccgttggctaccgggataagaacctggatttagatgcatcattaaaacaagtttctcagctttcaaactaaaatgaaatgttcttagaatcagctaactttttcatctttcaaaactaactgagcgtgaaaggagaaggaatggataaaagaaaaaactccataggtatagaagataaaaccaagatcagttctcatcatatatcatgagattacatggaaatgcattgatcatagcttcatgcgacttacacgaggtgtgtggtctaaagaccagtcaatgctattgaactctttgttcttaggattctggtaaccatcacgcagaagctggagaaatgattggaaaagaagactatgagaagattgttgcatatcgagaaggataaagaaaagcatgatccagaaaagtataagtgaataggatatagaccagaaactcttcaattgacttggctgtggtttctccgaagagctgctccgccaaggaaagagcaaactggaaagaagtgccgggtccacggctagttgtaagctcccctgaaatctgaatgtttgtcttaacagcccagaatgtaggaagcttcccgaaaaaagcaggatgtcccgttgtcttgcacgatgaactacaccaagtttagaaatcaaaacatgaagagaaaagattagttactagatgacatcaaagattttgatttataccctctttcttgtcaaaagtccccatggaagaagagtaatagctggagccatggatatagccccgtataaccgcttatcttcagcttgtctcttcatgatcttctcgagaatttcacagtctcttaacctaacagcaccaggcatgcctcccttcacaatttgtatttccagaccatccagaaacaaatacacaaaaccattaaagtaaagctcaaagactgtcctcacttatagtttatgaatcagcaaaagaggaacttaccggcaaagcaactaaatcataaacttgatcagcacatttcgagataagaacatcagcaagcaatctggtccctgaggatccttcaacctctagcttctgctccacagaagcaacagtaacatcagcaccagctcgccgtaaaacatcaactaacacaacagcttctatttcctccgtcccatatccaattggaacaagcacctacatagtttctcagttatctccaatctcaatctctctacacaaacaagctggacaattttagttatagataacaagaaaaaaggagaaacctttttagtagttgcagaagacccgacgccaacatcggaatctagcgttgttaccatacccggagacatggaagatctaagctttaaagttcggtccctccttgttgtccctagtgaagaagaaactacagagactgaagaaaaactaggagcaacagtcatcgagacacaacccatcgaagagataagccttgactccatcaaagttggactcagcgaagctatcattgaaatcgaatatcctaaagaccccattgacgatagctaatgcagcagtctgataatcccgccgctagacggagagtgagttgcgtcttatctactagtatacacttcttgaagaaagctaaaaacgtcgtcgtatcgttgtcttattgcttgattggataaagcttcaattttttcctccaatttttgtcgaaaatgtaacattttttttgctttccactgtgagattgtcacacacgattctctaaagaaatgagacgaattttgaaaacgatttataaaaatagtatttttgtttccttgagcttatctcctcttttctctttggtttgagatatgaattacagacaatcaagtagtcagtcacaacagtgtgtataaatatgtcttttaagtgaaatcggtttcgagagacagtgagacgaaaatgttaaggattttggggagaagagttgtttcagcttcgaaagagcttactagtattcaacaatggcggatccgaccaggaaccgattctcgtcccgatccttttcgaactttccggggactacaaaagggtttctgcgtgggcattttaccggacggagtcgacagaaattcggaggctttttctagcaattcgatcgccatggaagggatcttatcggagcttcgttcccatatcaaaaaggtaaagccatctcatttatcgattgatgtcttaattgtttgcagatgaatgatataagtgtatctcggtggagatttgtaggtattggccggaggtggagaggaagcggttaagaggaacagaagcagaaacaagcttttgcctagagaaaggattgatcggctacttgatcctggttcttcctttttggagctctctcaggttttgttttgtttctttgtttggatttaatgcacatttgcaatctagagtttattgttgattagtacttgcataagttaggaaaacaaaagaagattagggaattggcattgattaaaaacttgtttgatgttgctgcttactggatatgaatatgtttgcagcttgcaggacatgaattgtatgaggagcctttgccttcaggtgggataatcacagggataggaccaatccatggacgtatttgtatgtttatggcaaatgatcctacagttaaaggagggacgtattatcccattactatcaagaaacatctcagagcacaagagattgctgctcggtgcagacttccttgcatatatcttgttgatagtggtggtgcttaccttccaaaacaggctgaggttttccctgacaaggagaattttggtagggttttctacaacgaatcggttatgtcatctgatggaattc

SEQ ID NO: 665 - DNA, 94091 bp, Arabidopsis thaliana
gaaattctccactcgtagctcttcgttctgccagagttgaagttgcttctgagctcatctacaagcaaagctgcttcttttccactaaagtctgatgcttgctcctttaccacagcagatagtgttgcataacaagtactgattcaagacaccaaaaccgcaatgtgagagactttaagactaaaaatcatggataagactaaaaaaacatggataagtatcaactgttctcacgattatttattcataccactgtacttaaacttaaaacccactatactaaatagaaaggtaatcatcaaaaaatcagtatgtaaaaaccacttttgtgaataaaatatgtaaaatgggtgaataaagaaatgtgcttacaatttcaaccgataagggatacaagcattgctgcaatatccaccaccaccacgacgagatatccgaaaaggtgaagttgcaacatttaatctgcaacaaaagaggccattcattaaaatggtactaattagatctaatcatatcatattgaatgaccaaatcattcacagaagcatccattgctccaattaacattctagaccaaattcaacttaaaggtaactcttttatacaggaaaccgagaaaccgaaaacgcaattcacataaaaaggaaggcttgtttggagaagcagaatcgaacaagtcaatctcaaaccctgatgagcaggtttttcaagttacctggcaggagaaaaacccttggcaaaacaaagggtttgaatatgattaatctctagaagcttcgtcatgacttgggttcagttaaaaatctcaaattggagacattattggtgtttatatatttgagagagagagccagagaggagacgttgaattgaatgaagggtgtggtcggaagagaagacgtgtagaagagacgagacaagtaaatttaagcattggccccatttacagccacaagtccgctacaacaaattatttccaagaaactctgagataacgtcgtgatgaaacggctcatgctgctgttgtgattcgtgaattagaggtttatcttttgggtttttgaatgttacttaattggacggtcgatttttcaaactgggtgtgaaatgtgaatgggtcattcataatgggcttttgttttaatgtgaagccattcacacactctttgtccttcttttctattattcataactgtcactctttgttcttcgaaatagtaaagagcaaatcgattctttgttgatctgggccgtaaaatttccatggttgtgggaagtattctcgcagctgatctgggccgtcaatgctacagtttcatgtcagagagaggtcaagaatcaacacgtggccaaccatgattttaaaccaaagcaaacacacgattagaccccacattgtttgttcaccaacccccgtggaccctcctttagccgacgtgtccacgtcaatagtggtttttcttcctttcaaagtacacaaattccattctttctcattttactttttggattacgttgttgttataaactggtaaaatgaattatgaatgcaaataaatttcatttaagttttgttggcttctaatatttttttcacctaaaattctaataaactacacagccatgagccatcgtatgaaaagaagaagaaaaaaaatgtctttttctagaaggatctttcaacgactaaaaaagattttaagcttttgactaattttgtcaataatatacacaaatttacactcaattatagccatcaaatgtgtgctatgcagaaacaccaattatttcatcacacatacgcatacgttacgtttccaactttctctatatatatatatagtaatacacacacataaacagcaaaagcgtgaaagcagcagatcaagataagaaagaagaaagaatcatcaaaaaatgggaataatggaggcagagaggaaaacaacaggctgggctgccagagacccatctgggatcctctctccttacacttacactcttaggtttttaattagtttcctcttcttttacatctttgtgttttgttttgatttatttcagtttcatcatcttttgtgtgttttgattacagagagactggaccagaggatgtgaacataagaatcatttgctgtggaatctgccacaccgatcttcatcaaactaaaaatgatcttggcatgtctaattaccccatggttcctgggtataataatctcttctttcttgttcttgatcaattctgatgaaaatgacatatagagtacaatagaatctgagatcgagtgatatgttgtcaggcatgaagtggtaggggaagtagtggaggtgggatcagatgtgagcaagttcaccgtaggggacatagttggagttggttgcctcgttggatgttgcggaggttgtagcccctgcgagagagatctggaacagtattgtccaaagaagatttggagctacaatgatgtttacatcaatggtcaacctacacaaggcggcttcgctaaagccaccgtcgttcaccaaaagtacaactctttttctttcttaacttttatgattatcttgatcttcgtaaattaattaatacaggttttatttgattgcggtgatcttgaaatccagtgataataatctttgtgctatttgatcaatgattttaaaaaaattagtataaagtatgtgatgaaattcaatcataatatacaaaaatcccaccaagtttatgattgaatttcaacacataatcttggtgttgttcaactaacgattttggcatatactaactactcataaatatccttatactaaaatcaaagagatgcatatgaatttgaatttatctaatagaaaatcaagcttcaaaccggatctttaggttttggtttaggtatcttggggaacagggtagggtatgtttggctaaagggtcaatttcttgtgttcaggtttgtggtcaagattccagaaggaatggcggttgagcaggctgcgccgctactgtgcgctggtgtgactgtgtacagtccactgagccactttggtctgaaacaaccaggcctaagaggaggtatactagggttaggtggagtcggtcacatgggtgtgaaaatagccaaagcaatgggtcaccatgtgactgtcataagctcatcaaacaagaagagagaagaggcattgcaagatcttggagctgatgattacgtgatcggatccgaccaagcgaagatgagcgaattggctgattcgttggattacgtaattgacacggtgcctgttcatcatgcacttgagccatatttgtctctgcttaagcttgatggtaaactcattctcatgggagttatcaacaatccattacagtttctcactcctctgcttatgcttggtgagtcccttattaaaaaagttaaccctttcttaatgattgtgatttagaggattactaattgggaatgatgatgatgatggtttgattagggaggaaagtgataacggggagcttcatagggagcatgaaggagacagaggagatgcttgagttctgtaaagaaaagggtttgagttcgattatcgaagttgtgaagatggattatgttaacactgcgtttgagagactcgagaagaacgatgtgcgttataggttcgtcgttgatgtcgaaggaagcaatctcgacgcttgatatcatgaaactcgaggctttttatacatactcgaatactcgatttaaacactcttatgtttgtttgtgagctttttcattcgtgtgtcactatttttcatgagaaagtggtaaaagatataatgatattggatttctaatcatgaatcatatgatatatgtgttaaaatatttgcccttatgtcgggtttgagtcttactatatgaaacacaattcttcggactaaaaacagtgactgaaagcgaaatccaactacaaagtacgacttgcatattatattttattcgttaatatttgtaagctgtggtataagaaacttgatgcgagtgtttggtccttgaatcttttacaatagtatgcatcgttgacgatttcatgtttatcaaagtgagtggtaggttaaggaagactaatttagatgtacgaccgttgattataattttttcatgtataaatgttgatacacaattggtggtgcaaattgaaattacaaatgtgtgcaacttagtcaaatgcttagttggtagataaagagatgtctcttggtgctatgtcagaacctctattggaccagacaagagagcatggcgtggatatttatatttgaagtcgataattcgttacccttttgggctttatatacgattccctcttctttacaataagtggttggatgattgtttaatatttctaaaatttcagattagaaaaaaaaaaaaaaaagagaattcaaaaacaatttaaagaataaaacactatacatctaccagctatgaggagtccataactaagatatagagtaatatgttggatctgtgtcaaaacaaatattttttctcagatcattctttaagtacaatctgaccatcattcttgacgtatataatatgtgcagagttcttgggattcactaacgttgtcatcatggcatattcatgaaatatgtcgacagattaaatccgcttaagatcatattttatagctatagtcaaatatttaagatccattgtctacaataaaagatgacattatcttttatggggtatcagatcggccataggcacattattagctatcagcctccgaccaaaaaaaccaaggcattgaatggatgtatataactatataactttacagcttttggtttatagatgagacgtttacactggggtaaggatgaagtgaaaacgaaaaaaaaaaacattagacctaaaaaaaaacaagaaagagaatgaatatactttatagattgtataaacgacatcaacccgtgatcgttacgtctaggaccagccagatgaatatactttatagattgtattttttacttacgtccaaaaaatcttatcttatgtgttttagaaattgactaggtttaatccccatcatatccataggccccttttataatgcacatgtgagattcttaatgatcaccatttaaactttctccgcgtttacacaaattacgtatcttaaataactaacactcaactaaagcctttgatgaatattattattatgctacttatacacgacaagaaattgtcctaactacctacttgttgcgaatgaagcaagcaaatatgtattaagataatttatgtttatgcctaattattatcttaatcaacaaactataatttacaaaattgttttgtgtgactgttgctctctcggacaacactcgtttatttcgcatcaattattctcattcttatgtgactcactcaaaaccaaataagatggaccacttcgagccttgtttctgttatatattcgtccacaggctacactgaaagcgatgcggtcatagcccattctctcgtcgctttcatgtttgttctccaaacctttttttttctccttgattgtgctactgctttggcttctttcaattcttagatatttttaattttattttcagctataacttcatttaatatggctaaatagttttcttggtttagagtctttagactaaggaataatttcatgaccatatttttaacttttcgattttcgaaagattcagtttaggcctaactcagtttgccaacttgtgtagtgtgtgaacaatttacacaaaaatcaaactctgcaaggtcatttttccaaaattttgattattaaaaaaataaaaaaaaagatgaggataactgacatgtcagttttgtggtgtcccttgttttgtctttgattaatgtatggttcatttcatacgagaccctctgttttggcaaacctataacgggttttctcttataagttctaagatgagaaagtactacattgagatataattactcaattacatactgtacttagtcgtaataatagtcggtgattatccttttaaactttctatggaccgaaatgttccagaaaaaaaatgcaatagtttagacttttaactttattttattagcttttcttcatgtaaaccaaaaataacccaaaagcaagcggtaataattattctgtcccccatgaattgcttttactttagtgaatgaagtagattttaaatgcgaaaatatggctgctgctgctcatttacagttttacactaatgaataaatatgatcaagaatcattgattctacaccttgtcccatgtcaagtctagtcaaaagcttattttatcaactccggctctttaagattctctctctctctctctccttcaccatctcagagattgctccactatctcatagatttggtgaccagaacaacttatctcttgagtggttcaacctctatctctctctctttctgccatgaaaatgcaaagccaaatgtaatagttagagagggagaaaccaagaactgaaagaccatgacttccaacagaagcaacctcctgttctcattagtcctcttccactttctttttgtccccacacaactccaagctcttaacactgatggtgttcttctgcttactttcaaatactccatcctcactgaccctctctctgttctacgcaattggaactatgatgatgcaacaccatgcttgtggacaggtgtcacatgtacagagcttgggaagcctaacacaccagacatgttcagagtcacaagcttggtacttcccaacaaacaccttttgggttccatcactccggacttgttctcgattccatatctaaggatcttggatctgtctagcaatttcttcaacgggtcactcccggactcggtgttcaacgccactgagcttcagagtatctcccttggaagcaacaatctctctggtgatttgcccaagagtgtcaacagtgtgactaatctccagctcttgaatctctcagctaacgcatttactggcgaaattccgctcaacatctcacttctgaagaatctaacggtcgtttccttgtcaaaaaacaccttttcaggtgatattccaagtggtttcgaagcagcacagattcttgatctttcttcaaatcttctcaacggctctcttcccaaggatttgggaggaaaaagcctgcattacttgaacttatcacacaacaaagtcctcggcgagatttctccaaattttgcagagaagtttccagcaaatgccacagtcgatctctcctttaacaacctcacaggcccaatcccaagttccctttctttacttaaccaaaaggctgagtctttttccggtaaccaagagctttgtgggaagccattgaagatcctttgttcaattccttccactctttcaaaccctccaaatatctctgaaactacttcaccagcaatagcagttaaaccaagaagtacagctccaataaaccctttgacagaaaaaccaaatcagacaggaaaaagcaagctaaagccaagcaccattgccgcaatcacagttgcagatatagttggtctagctttcattggtctactcgtgctctacgtataccaagtcaggaaacgcagaaggtacccagaatctagcaaatttagcttcttcaagttctgtctggagaaaaacgaagccaagaaatcgaaaccaagcaccactgaggtcacagtcccagaatcaccagaggccaaaacgacatgcggttcatgcattatcttgaccggaggaaggtacgacgagacatcgacatcagagagcgacgtagagaatcaacaaaccgttcaggcattcactcgaacagatggtgggcaactgaagcagagctcccaaactcaattggttacagtcgacggcgagactcggctagatctagacactctgctaaaggcatctgcttacatattgggaaccaccggaaccgggatcgtgtataaggcggtgctggagaacggcacggcattcgcggtgaggcggatcgagacggagagctgtgcggctgcgaaacccaaggaattcgagagggaggttcgtgccatcgctaagcttcgtcacccaaatctcgtcagaattcgtgggttctgctggggagacgacgagaaacttctcatttccgattatgttcccaatggcagcctcctctgtttcttcaccgccagtaagttcctctgtttctgtaagcgcacgaaaaaaaaaacacagtatcatatctaaaatacgcaagtcatttggtacacattagcactctaaaatacgcatcactgtttttttgtccttcacaaacagctaaggcaagctcaagctcatcttcttcgtcgtcattacaaaaccctcttacttttgaagcacggctcaagatagcaagaggaatggctagaggactatcttacatcaatgagaagaaacaagtgcacggtaacatcaagcccaataacattctcttgaacgctgagaatgagcccatcatcaccgatttagggctagaccgcctcatgacaccagcgcgtgaatctcacaccactggaccaacttcgagctcaccgtaccagccaccggaatggtccacaagcctgaaaccaaaccctaaatgggacgtttactcctttggcgtcatacttttagaacttctcacaagcaaagtgttctcggtagatcatgatatagatcagttctcaaacttatccgactctgcagcggaagagaatggccggttcttgaggttaatcgacggtgcaattaggagtgatgtcgctcgccatgaggatgctgcaatggcgtgctttaggttagggattgaatgtgtctcttccttgcctcagaagcgaccatccatgaaagaattggtgcaagtgttggagaaaatttgtgttttagtttgatttcttaattcgtatagcctaagtcgttttggcaatatagaaagttatgtgttatgtatgttttagatgtgttgcttaatgcttactttaccctcgcataatactaactcttactttagagtttagaatgtgtttcactgttttgttatgttatatcacaaccaaaaagctatataaaaattagaatcttaaccgatgaagccaattaaaccaacacaacgggaatcacttaaaattaactcggtctaacttcctaaccaaacttttaaacagaccgacccaaaccggaccaagattctagtgtccacgcctcaacatcatcttctccgatcaactctgatgctcaccccaccaaactttactttctattcagacaagacatctcgatagcttatttctatggtctgatcacacgatagtgtattctgatatcatcactctaccaaagagataccaaattatggaaggaggatctatcactcccggtgaagataaaccggagatccaatctccaattccaccaaatcagatcttcatactctctggacaaagcaatatggcaggacgcggcggcgtcttcaaagaccaccacaacaatcgctgggtgtgggataaaatccttccaccggaatgcgcaccaaactcatcgatcctccgcctgtccgcagatctccggtgggaagaagcacacgagccactacacgttgacattgacacaggtaaagtgtgtggagtaggtccaggaatggcgttcgctaacgcggtgaagaatcgcctggaaacagattcggctgtgatcgggttggtgccgtgcgcttccggtggaacggcgataaaagagtgggagcgtggaagccacttgtacgagaggatggtcaagagaacggaggagagtaggaaatgcggcggagagatcaaggcggtgttgtggtatcaaggagagagtgacgtgttggacatccatgacgccgagagctacgggaacaatatggatcgtttgattaagaacctccgtcatgatctcaaccttccttctcttcccattattcaggtctctctatcctttgtgcgattttagcttccaatgtcacatctacataggttgtgacgttgtgttattggtgaaagagttaagttgcagattatgtaattttaggcttttacaatgtacatatcagttgttgcaagtgattttgtcttttagaaatcggtaggtcagatttccattggttaatcttgatggttttgattgaagcaggtggcaatagcatcgggaggaggatacatagataaggtgagagaagcacagttgggactgaaactgtcgaatgtggtctgtgtagatgctaagggattgccgctaaagtccgacaatcttcacttaaccaccgaggctcaagtccagcttggtctctccttagctcaagcttacctttccaacttctgctagacaatcaagtaagttcgtgataaggttcatgaatctttctgaatgtgtgtggtggactagttatatggatatcacaaaactttgtaataatggattggtaaaacattgatgttcatagtgaagaacaattagtttgctctagatactggtggattctgaaatcgatctaaaatattattagcagctctgttttagtccttcgttcattataactctaggatcaattgaagttacgaataatgatatcgttgcactccactatacataagtatatttcatagactagaaagtcaaataaaaccatagagaagtttaatgttgtattggtgatggataattgtttttgtcaggttgacgatcgggtattggtgagaaattgtggtattttcagtgtgttctagcagtttaatgtttgtttgtctacatctcccaagaggtgatatgcagtctaagtgatggacgatggtactgattatatgtaaatttgttatccatgtagagcacacataatattctttccgtttgtcacattattatctacattgcaactactaatagacatggccgataactttcctacggattagtcattcatggttcaagtttttttctcataaaaagaaacacaaatcataataaagatgtagacaaagttatcataatcgatcaagacgttaaaaagaaaacactaaaaaacgaaaaaaagaaaaagaaagctagttagggttttgattcatgggctcattcaaaagcccattgattctccttacgaacagcttcttcttcctcaggtgtaaaatcattctcaatgttgaaagttgaacgaatctcctctggagtcttgcctttgatcatgtccgcaacagtttggcatgtgagatcaagcaagctttttatgttgaggtaattcgcagcaaggatgagttcaaagatggtggattgttcgagatccatgaacttctcgtcccagttgttgagatcctcttcagagataggattagcctcgtcgacgtggtgtttcttgcagtactcgatcactttcacaagaatcttgctttccacgtttgcaagagggattccatcagcaacgcaatcgtcttcaaccatatgcgctatggtctgcgattggattgctaccgcttcttccacctcaaacgactgaccatcggagctcatcaacacgatcatcttcgaagacattgtgtgttccttgtggaggaggtttttcactgtgaagcaaatttgatgaaagatttaagaatttagagagcgaacaaattgtgttaaggtgatgaagttgtgaaaccctatgcgtctttgtatttataagccctagctagagtcggtgacaacaacatattataattcaacgcgtggtacactacggacaaatattttatttatatatataataattttaaattttataattttatatttagtaataaagttatataattttatattaatcttgtaattaaaaaaattagtgatgataaaataataaaataaatattttacctgtgttatatcaatccaaacccgtctcgatgtatttcctatcaatccaaacccgttctgctatacttcccgtctcatgatattttaattttttatgtttaaatattaataatgtttcataaaggtaaaatatatcactaatattctttaaaaataataattgtttttgactttaatgtgatgacattctttgtaaattcttactttactaacacaaaagtactttaaaaagtacttcaaaaattttaatatatataatgttattttttggtaaaaattattataaataaatatttaatttaatcataatttgggattgatatacttgtgtttttaactaactattttttattttaataacctaaatttaggcatttgttaatattttttgaatctgcaatatcaacttaatacatgtacaatttatttttgccaaaaaagagcaaaattatttagtacaattgaaacgaaaaatgttgattgagaaataattagggtttcaaattttattacgcaattatttttttaatgaaaatattaaagcatatattgtaatataagatttgattcattttattaactgaaaataaatgatgtaaaacgaaaaatcagggtgattaatgctaattggaaagatttaaatgttttttttttttttaatttcataaattttagtaacataatagattttatatttatatttaaaaataagtttagtaaaataataaatgtcaatggcatgccatagtaaataagtgctaagtgaagatttatttgttaaagtggctgcaaaaatgtatatatagatagttattgtttctaaaaaaaaaagcaattaaaaaaataacgaaatacttattttccttaactgaaagaaataagtaattttatgttgctgggcctttatatgagttttattatgctgttgtaactttaccatggttgggttaaaatgaaagaatgaaaaaaaaaaaaaaaaagtaaattaattgtcgactcatttttcataaaaggtaatttcagttgagtaaaccaaaataaaccaaaagatatacgaagattcaacagtacacccatccacgcgcggctgcgttgaatactatacggggggtgtcaacaggtcgacctaccaaaaacaatgcatctaagcagttgcaaagacacactaagcaaatctttcacgtgcaataaattatacttacgtcacagccatcagtatatcctttcaaatattcctcctcacaattgatgtatttacatgtgtgtaagttgacacaaacaaatcacttgccctgaaaactaaaactctcgagttttttcaaaaagaaagtccaattcaatttaaatttgaagtcttcaatttgttttcaaatactaaaaagtgcggctctccctctagtgtatggcctcgtttactagtagtgcggggaccttttaatcttttattactacttgttgcattcaagcatgaagcatggacagacactcccttagaaagaaaaacaaaattatgaaatttcctgcttcattttgaaatttctgcggaaacttatgatttggatatattataaacatagtaactcctctacattaaaaaaaaacattacaagtcttcttttcatttgggacataaatgttaaaatcttttatagatactgtatttaagtcaatgatctgattatctgacagacatcgtgagactcctcatgccatcaaaataaggcttcttcaagatctctatttgcattgtcaaaaatcttcaaagctgtaaataattttcgagtaatcttttgttctcggtcagagagatatgtaataaataaagtttacttttcctcaaagttgtacatttttttttattttttgttggtttggcaatttttccggtaaactatgcaaattctattcgccgaaacattttgcagatcactaaaccaaactgaatcacacgcgcgagccaaatgcgcgtgagatttcatcaccttcgtcaaaatactatcacatcacaccaaacccctgagccgactataaaaccttttagatctctccctcgtgttataactccgccaccaacaatatttttctctactcaattcactcacactccaaaagcggtagcaatgtcagccaccgccgccgcctcctcctcgatcgccgttgccaccaactctctcaggaacgtgactctgtcttccagatcgccccttccatcagccatctccgtggctttcccttcccgtggacgcaatactcttcagcgacgcctcgttctcgtttcctgcagtactggagacggatctaagcctacgattctcgtggcggagaagctcggtgacgctggtattaagcttttggaggatgtcgcgaatgtcgactgttcgtataacatgactcctgaggagctcaacattaagatctcgctctgtgacgccttgatcgtgaggagtgggactaaggttggccgtgaggtgttcgaatcgtctcacggacggctcaaggttgttggtcgcgctggtgttgggatcgacaacgtggatctgagtgcagcgacggagtttgggtgtttggttgtcaacgctccgacggcgaacacgatcgctgccgctgagcacggaatcgctcttatggccgccatggctaggaacgtagctcaagctgatgcgtctgttaaggctggttagttcctttttgattcattgcctcaatttcatactttccatatgttgcgaaatatttattgattatgttctttctatacctgtgattgatggcttgttgtgtttattaatttgtatcatgagctttccttttcctgtactgttgttgacgatggtgaaatttaggatcgttacatttgctgattcttttgaaattgagttttgatcattcttgtctgttatctagctgacttgtggatcttggttttaataataccattgtaatgcaggagagtggaagaggaacaagtatgtaggtgtttcacttgtgggaaagacccttgcagtgttgggattcgggaaagttgggacggaagttgctcgtcgtgctaagggtcttggtatgcgtgtcattgctcatgatccctatgccccagcagaccgtgcacacgccattggtgttgacttagtgagctttgatgaagcccttgccaccgcggatttcatttctcttcatatgcctcttacgccaacaacatcgaagatactaaacgacgaaacctttgccaaaatgaagaagggagttcgaattgttaatgttgctcgtggaggtgtcatagacgaagatgcgttagtgagagctctggatgctggtattgttgcgcaggctgcacttgatgttttcaccaaagagcctccggctaaagatagcaagctcgtgcagcacgagagggtcactgtgacacctcatcttggagctagtaccatggaggctcaggtgtgcaattcattttacagttcaggtgataattaatcatgaaatttctgtttggcttctgttatatagttggtgttttggctttgacaggaaggagttgccatcgaaattgctgaagctgttgttggagctctgaatggagagcttgctgctactgcagtcaatgcacctatggtttctgctgaggtgagcactcgcttgtgctagtaaatacacacatattggtgttgtttcaaagaggcaaacttatcagcctatttactgtagctagcctgggaatgaatgtagcaaattatatttgttccgagttggttagaaagaagttagtgagcggcaaaattgttgaagtgagggtgggttttctagggatttgttttaagagcctcattaatcaagtttctgtgatttctgaattggattttagactagcaaggtttatagctttgttcttatcagattcaagttggaagatttcaattgttaagactatccatgtttgttatttgctcaagcttacatgcattctatctgcaggttctgaccgagctgaaaccatatgtggtgctagccgagaaactaggaagactggcagtgcaactggtggccggaggaagcggtgtgaaaaacgcgaaaatcacatacgcctcagcaagagccactgatgatcttgacaccagacttctccgagccatgatcaccaagggaatcatcgagccaatctctgacgtatatgtcaatttggtcaacgctgatttcacagccaagcagagaggtctcagactctcagaggaacgtgtgcttttggatggttcaccagagagcccattggagacaataactgttcagctaagcaatgtggagtccaaattcgccagttccctgtctgaatcaggagaggttaaagtggaaggaaaggttaaagacggagtcccgcatttgacaaaggttggatcttttgaggtcgatgtaactcttgaaggtagtatcatactgtgcaggcaggtggatcaacctggtatgatcgggactgtcggaagcatccttggagagtctaatgtcaatgttaacttcatgagcgttgggagaattgcaccgaggaagcaagcgattatggcgattggagtagatgacataccaagcaaagagacactgaagaagattggggaaattccagcggttgaggagttcgttttcctcaagctctagtttggtgtgttgttgattcttgaatcttaaatctcaccggtgaagatttgatgttgtttgttggtttaggcaataatgttattttggctttcatacagttttggtaacgttgagagtagtgtctctttgatgtttcaactttatggtttctattacttgagtgcttctttcttctctgaatatttatttcctgaatattagtgaccacaaattggtttataacccaattgaacgaaccgatgtaactatcgtagagaatctgttaattaagccaatccaatttttcaaaattggtttggtttggttcagattaggttcggtttgctctaagagatgcagttgtttgtgaaacgccaccgttttggaaaactgtgtagctcgaaaagatacgaacttaatgagtggagagaaaacacgtgtcctcagcttgaacagataattctgcgactcttgagaaaggaagacgaaggaaggagaatagtagaagaagaagaaagggagagtcttgtgatatctacgtagaaggaagatggccttatctcaagtgtctgcgtctctcgccttttctcttcccagtactctttctttctctcttcgctacccttcttcttcctctagttgtacaattgtctctataatgtatgtatctgactagtttcggatttcatgtttccagattctggtgccctaaagctagccacaatcacaaacccaacttctacatgtcgggttcatgttccgcaacttgctggaatccgatccaccttcgcttctggttctcctctctgtacgtcttccttgcccctgagaaaattcttcaattctctacattttgaagtttagtttgaaattgggctcaaattttgatatttctgattactgaattgttcatatatagtttggttatctgaaatatggggcaacaatatttatcataaagttttctaattttgctttctgcattgtctttgttagctgagtaaatccatggaaaaattgaaactttgtttctttcgtttttgtatgttgtgtgtgtccgtttcagtgccattgaagttgagtatgacccgtagaggaggaaacagagcagcatcagtttccataagaagtgagcaaagtacagaaggaagcagtggtttggatatatggcttggtcgtggcgccatggttggttttgcagttgccattactgttgagatttccactggaaaaggacttcttgaggtaatcaaacatcataactgatattgttgcttatataaaagttgaaagtttgagaaatgtaagagaagtagaataacttaagatttgatttgtcttcttatttcagaattttggagtagcaagtccattgcctacggttgctttagctgttacagcattggttggtgttctagctgcggttttcatcttccaatcttcttctaaaaactgatcgacaagaatcttgttttgtgatgctgccgaggatcattttcttgtattaagaatcttgtattatatatcactgtaacttctacatccatcagtggagaatcttacattcttagttttttttggcaacatacatgatctatacatgtcttttggccaaatcttatttttatatttttaatacatgatctataacatgtattaagtttgaaaacataacaaaatttttgtaacaaaaataaccaaaatattatttgaaaaagaaatatccaaagttttaatagtaataatacaaaaatagaagtttgaaaacattttttaataaataaaaaagtgttaaaaatttatcacaacgctaacaaacaaattcacctaaccgtttacttttagaatcagaaataaacaacaaaaataaactttcagaaagttgcagtttcacatatgttacaaacatcatcagattctttgaaacaaaacagtaaccaagaagtttcttatgcatagctttgttcaaaatcaatactttggagttagtcaattaaattcatatgcaaatctctgaccttttgcttttgtaagctaaatgcattgaaaaaagggagaggctctggatcagtgtgctcatggtgggccggcccatcactatgggctgtctaaaacaaaaacaattttggaaggcaaaaggtataataaccccgtccctgtatgttgggctaggcctgtccagtatccaccaccactaactcaattcccccattattacaaatttacaatctctccaccaattggccaacaatggagtatatattaactataaagcaaatcataaagcttctatagtaacatcaagctatgaatatttttatacgttctgcaagaaacgtgacatcaacattttgtgattaaaccgattcttaatttgtccctttctatcatcaagttaaaaacgtgacatcaacactttgattaagagaatcaagaaacgtgacgtcaatattttgatgaagcttgtgaaatgtggacagctattttatcctcgatgatattcagattgttttaataaaaatcatttcagctatttttagtcaatatagacggttttgccaaactcaaaagtcaaaagtcaaaggtcaaaggagtccattatataaaccatagcttaatcatttgattactaaacactagtataaaaaattgaacccgttaaccggcgacccgaaacaatgacccggtccgtcagtttccctctcttcctcttcgccgttgtactctccctctcttcttctctcctcgccgacgatcccaaaccaatccgccgtgaggtctacgaaggaggtaagatatacgacatcagccatcgttacacgccggagattccagcttgggaatcttcggaaggattgggaaagacgttcctgcgattagccgcgagtatgaagaatggatcattcgctaacgtatcggagatgaaactatctgttcactctggaactcacgtggatgctccaggtcacttttgggataattattacgatgctggttttgatactgattcgcttgatctccaagtcctaaatggtaatttttgaatctggtgtttattgattttagttgggttagtgataaagttttgaaattggggtttttgtgtatataggtcctgctttgttggttgatgttccgagagataagaacattactggtgagttgttgaatttgtaacgaaaatttaaagttagtatcttttgtctaatgatttgtgtttgggttggattattatttattagctgaggtaatggaatcacttcatatacaaagaggagttcgtcgtgtgctctttagaacatccaacaccgacaagtaagagtctcagtattgagagtgtgtgttattaccttaatcttggtaaaaacaactagagagcataagcttactcactctgtgtttgatatatatattaggcggcttatgtttaagaaagagtttgattcaagctttgctgggttcatgaccgatggggctaaatggttggttgagaatacagacatcaaacttattggtaagagatggacaatttcggtttcttagcttttcatgatcgatagcttgtattacacatttttttctgaaaccggttattctgcattgtggaatccagggcttgattatctttcatttgctgcttttgaggaatcacctgcaacacacagggttatacttaaaggacgggttagtatatctttctctataaaaaaatattcaagtacctaaacatttccaattctcctgtgatgtttggatgtcaaaccatgggatatgattgaatatagcggtattcactggacaagaaagtgagagagataggtaggcttaaaagggagatgaactacgtcttaacacgtgagatacacatgttttcaggatataatcccagtggaagcgctgaagctggatggtgtggaggtaggaacatactcgcttcattgcttaccgctgagattagttggagcggaaggagcaccgacaagatgcattctcatcaagtgattcagttcttcttcttcttcttctgtgtaagttgttcagtataccaaactgataatgaataatatgcttcttactttacaagatctcagaacccatgaagcagatgtgatgattcagttgtaaaaggaagcatacctttataaacgtgtgaatgtattatgtatgacagtatatttgtaattctgaaggacatgataataaacctagactgaaacaaacgaataatataaccacttgcagtgaatgcatgaatctgattagacgtgcgaccaaaagtaaatcaaaggtaatctcatctccatattatctgaaactctcacttcacacaacaaagtaactgctggcccaaaagtttctgtcttgcaacaatagcattcttcctcaagctctctttattgaataagtaagtacaaaaaaacaacccagaaattatttaaacatacaataggcaatagcagattctccagaacaagcaataaacagatggtcttggaatttgtagaatcgaaagaaaagaagcatgcaggagttgaagcacgttttctttttggacaggggaaaaaggaaacacaatctgtgtgttttggttgtattccattatattgaaagagacatgcaagtcccatctagcttgcaaaaagctagcgtacttagcaccaaggagaagcctctgaatgcacaagagagcgttctcgtggttcatcagttgaatgataatagaagtgaaccagctctgcttaccactaaaattagattgttagatgttgccaaacgaattgcaaaagaaaaatcataaccaaacaattctccaaggtctcgggttcgacaagaatatcaaaaaggaaaaatcaaaataaaactaaatttgggtgactttgattcagttcacacgttcatgtcaccaaaccgtactagtaagcgcatgcactaaacccattaaagcgtttggcccattggacataaacacattgtcaaaccactctaccgttccccaaatttctccattttggcgtttttttatcgcaatttccgcatcaccaaatcatttttttctcatcaacatccacatacttctcccacaaaatcaccattttttcaccataatccgccaatttaacgtggccattacaaggcaaggaaggcagtccttttaaaggtgtccatactctttctttggggtcataccaacggattttgtggacaaaacaactgtataacacattctctatcacacaataagaagatcctggccaaccccaaccattcgccgacatgtctgctgcactccatctaccttcatgtagcttgtaagtcacatcctttttctcagaccaaacatagacggttccttcataccttacgctttcgtacgcagagcctccaaatatctcctcgctagggatctgtaaaaactcccaagtttgagttttcgtatcaaaaacctccatccaattcgttgaatctagattatcacagcctcccattacatatattttcccatcaagggtgcaaactgatgggaacatgcggggcacccgcatgcttggagcttcacgccacgtgtgagaacgagagtccatgaccataacgctagacaaagtattactctttattcctccgccaatggcatcgatattaggaccaaccactgcaatacccgcagaggtagaattgggagataaaatttggaccaaaatctttctggaactatattgtctctggccaagaatgaaccaatgtagttgtttagaatcagtacggagtcgtaagcacacgtagaaacacctctcggtgcggcctaagagggttcgggtttggtaaagctctactgaagcaaggagagagtgaaatctcttacatactaatgagagagttggatggtttgatcttgagacgcgcgctaagcagtttaatattaaatcatcatgaagcatcagcattgttttaaccggtagctcttctccatcatccatggttgccgatcaccttttccctttgagtggtcaaggttgcttatcaagtaagaagctctttctttttccttaagtaagctttttttctgtctccaaatttctcgcctaaaatctttctacagggaattatctcagtcataattttattaggattctcaacgtgttatttcctaaatatcgtgaatttgtaaaacaaatggatattctttaactaggatattttccttaatttcctgaatatcgtgaatttgtaaaacatatgaatattctttaactaagatattttccttaattttatcatcagcatatttatgggtttaagaaagtatatatattgtttttgttgacaacgacaaattatagtaagctaggtgtctctattccttaaaccattctcttaggatttgtagctagctattggctcacttgatgccactgtctgaatgggcttggctttaaagcctgccaagtgagttcgagcgttgaataaaattttcgttgggttttcaagagaaatttaaggttatgaggggcttttaaccaggacatgcgagcgaatgcctctatttcacataccaaacaaaaaagagatttatttatctatttttctataatgtaaataaggtaaaagtaaatatacatagagaagataggtcaatcttaaaagtagtagagagagaagatacccacaaaatctttgtctaaacaaattacaggacatccttttgcagtggtgactgatgagacatcatccaaaccctcttcattacttcattcagaatcaacacatttatgttagtatgtcataataaaactttaaatatggtaatagttgaaaaaccaatccctttgcttcattcaggttttattttactttttgttttgttttgtcaactctttgacctcgaatttcttattgcaattaatttcttacccacaccttgctagaaacaattactgaccctcccaaatacttctatcgactcaattactttgacaagtttatatgggtacatgcaagttttgactcgatgttgtttctattttcgtagatgcaagctttgattaaaccctgcatatatgtgttgtctttgattctagctggaccagtcggattgaatataaccatctaacatttaactgtccaaaagatatattaattgtttctggaacattccaaaaacagaaggagctacaatcatttagacagacactcaatttcgtttcgagcactctaatctgtgctcacaaaggtggattagttgccatacgaaccatatacataggaacataaatcaattaatttattatttaatagatagttatctctcaaaaggcaacttagaattaaaatttgtcaacagtaaaaattcagaaattaaaaagtttcagattaactcaaaattctttccttttttatacaacagtttttttatctattgtcacttgtctaaccaaatgtttgtagataattcccacaatttttattttgtattgtagtttgagatatatatggcttttacatggaagaaaaatatgcaagaacatgtaagattcatatatatctttaaatttaaatgtatcaacgagttgaatgtacgtaatactataagtctttttataatactaattagaaaattatactttattttttgtttataggtaataaaattaacaaaaataaaggtaataaaataaaaaatgaacagataaaattcaataaatatcaaaagtacaagagtagtaatggtaggtaaaaaaataagttgaaatgaatcttacaactcatgaggataaaaaatgaaacgaagctctgactttatttaatatgttggcatagttttgctcattcgcttcctctgtcaaaatcccgacatttacttgttcaagtaatacgtacgtacgatccaaccgtcaactccataatatgcattatacctacatatatgtcttatttttagttttttttgttcatctaccaagaaaaaaaaagtatatgaaaaatttgagcgtaccaaaaaaaaaatatattctgatcgagtcataattattttgtgtgaccacgatttcagagtgaatcgtttgcccacgaatttggacaacatgtaatacatatctcgtgagtttcacctttcttctctaattgttgtaccatatatatgatgattaccttactccaatacgacaacatgaaaatcgaaatcccaatataacatagatattaaacttctttatttacttttatagatattaaacttcaaaaatccgaaaataatcttacaattattcatatcatttatatatattcaatttaatttacagtagtttcttatttcccaaaaaattaaaaactgataatctctcttgatgtcatttctagtggacatggacagaacgtagaaaccaaataataacaaaagtggtatttcttaacatatatatgcttctttcattgtacatatatcactaattcactacactgtgcgcgtataacgtatgcatggagtactggatgttaaaataacttatcgacttatcgtagagtggctactatcgaaatattctaatttcaaaaagaaactgtttctgtagctccaatcgataaatgatgcaaaaaaggagaaaatgtttgaggacattttgtatgtttcttgatgtttctttgtgaaaccgtgagactatagatttggcttcatatatgaaattgtgaccactattgaattatatggatacacaaattccacattggataccagttgcaatactggggttcggtctgtttataagaaaatctttcattaaacatatactctttttgataaagaacaagtatatataattcaataacatttttatctttttattttttgtagtgagcattttttaatcttactaattaccattactctcatgtacgccgggaaaaaaaaacacattactcatcatgtcttctatacataattaacctcgttttatttgttcacccaatgtatttaacaacatttatgtattttctgtaacttttaattgccaacaatatatttatcataaatatgtgaattcacttaacagaatcaatttttttttttttatcatagtattgttaaaagcctcatatacgaatatttgactttgagacacaacatcatgaatcttcatattttcgacatcatcatttagacaaaatttcaggtatcttcgttatctaagaggctgttaatagaataatcaactaaatgttacattcatttgggtgtggtatattgattgaaaatggtctaaaaggctcaaattgctatgcatatattatatttatacgtacggatatttaagataacatgtacaggctatagtcatataaaatagacataaaatatgcatgtatatatgagaacggagaagtgtggagataaaagcatacaataatgtgaatcacgaaatagaacaagggtttgggacctgcagtctgatttgtcttaaggagagggccatagcgacaggttctgcaattgcagctcacactataccctttcttcttctttttttctgttattttccattaatattatatttcatttttggacctacttcatttataacccttatagttttcattttcatttttctatcattattgccataattgctcaattaattactaatcattagaagagatctttggatgcatcccatttatgtcttatgttgcatgtttaatttacatatattctaacatattcattggtttatgtagttttctaaatttctatgcagaatttgacctctgcctaaacaaaaaaaaaaaaatgtagaatttggaccgagtcagaaatataaaaaagctcaatagttcagtttggttttagtttgtatatggcttggaactaaaagctaatgaattgcttacacctttttccatctttgccttaaatattcggaatacatcgatatgaagccgataacataattttttaatcaatacaaaaatttgcagtaaaaaaaaaagttattacaaaaattcattaaagtaggaaggagtctgattcgccactcgctcatccttagaagaaccttttcctcaataattgtttattaattaaattatttttatcattaatttcaataaaaataatttaaatggtatattataaaattttctgataaaatagaaactaacaaatgggcgtgtcagtatacattgcattgaataaattgtggtatttcatttaagataattgttgactatccgatcgtagctgttgaaatatggtcagtacgtagtttatcaactatagttgaaataatctttatctaaaaagtctaaaccatagattctaaatagtgtctcgggatgtcatccattttccggaaagaaattaccaacccacgttgaaagatataacatcaaaacctgagttctaatcccatattgactgtgagacacttcaaaaagtatatatatatatatatatgtgatcatatgatattaaaatacagtatatatttccttgtttatttgttataatttcccacatatgaatatcttttttgttttatttactgcattggaccaatgattacttggttttatgaaccaccatatagactttgcagctgtgagacataatcatggactatacaaattttgagaatgcagctctttgtttttgttttttttacttctttttatacttcctttgttttgaagctaatcatgtcctgattttcaatgcatgtgaatttgtcaacatcccttgactagtaaaaaacgtatgtgcagtactcaattgtaaaagtataattagtttatgatatatatgtacttttggtttgcttcgatcaaatcgtcaacaaagagaataattcaagtcatgacttcttctaagaaactcttaacacggcgtatattcttttatatgggtaaacacataagcaatttgaaggcttactttaatcttttgatgattgcatgtggcaaattaatgaaagtagcttgtagaaatctatggagatctgtttgttatagcttgtagaaatctatggagatgtgtttttggagttcttttagttttaaatgagacacataattttgaaactctggatcatattcaaactcaagatttatggcactataaaaaaaaaactattaaacatttaagttatttatgttgtatcataaaataaatctgtaatttaaaatttgttaaatatattgtacatatatgaacgaagaggatggagacagcgataaacacaccgaattctttcaatgaatgactatctgatctgattgtttatttgtttaaccatggagcaaatattgctacatgcaagttgcaacgttaattaaggagactcgtatgcatagagccatagatagaataggcaagtagcgcgtggtatgagacgacgtaaaaaatgtgcatacacaaacgatgcatttaaatcgctgttgatagtttgcttactatcaggaggaaagagtttttcaaaaacacgaattcaaacaccgataaaacaaatgaggattaaaataatgatccgaaaagatgatggacctatatatacttcaaacttttttcgactattaagcaaaaaaaaaaaagacattcacttaattagtgaagtaaatcgatcgtaagagataatgttaaaccatatcgatgaatcgctagattagaagtgtttccacagtttactctacttgtgatttatcttaacttacttaatttctcagagaatactgataagcatatgcagcagttctgtaacaaattttgatgtattgtaatcttctccccggtataacattttgaccatacacacattctcgtcacttcaaattacaataaaagaaaaaaagaagagtggaagtaaaaagggaagagactaggtcaaaagaagaaatatttaagatataaaggtcacaaagccattgagaatgataataatattctataattattgttgtggggacacattgacctctttgccctttctccatgttgggtgcaagctgttttcctttcccattttttctaaacttttttcatttgtttttaccaatacaaatatattttgatttctttttttaataactgagttttcttcaataaaaaagcatcgattttaacacctattaattaaaaattaaaaataaaactaccaaaattcaaagctgactaagaatagtttcacatttatttgatgggatggaatgggaagggaatgaattattcggtccagaagagtatatattatacccaaaagtaaagactgtaaatagatgtgaagaattttttttttcgaccaatttttttttggttaaaagaacttattttcttcgtagcaagtaatctctttttcatcttatctttgtttcaggaaataaataatttatggcaagtcattatatggttcacgagatgcgtatggtaccatgatattgataacataccttaaagaggagaagaccattagaagagacaaaaaaaaaaaaaaaaaaaaaaggacagaaaacacattctccacaacatatttattatttgaaatttgtaaaagaaaacgaataactacaaagattttttggtctcccattttgaaaacctcccgatttccacatacatcctttttcacctttcatcaattatgtagctacatgccctactccagattttcaaatgttatcataaaattatagtaatgcatgtggccgattataatttttgtatagtttggtatgcaagttttgatatatcatcttaattgtttaattttaaaccagtgtttttgcactagagattcttttattagattaactactcaaatttcagtatttttatttgttcagttttgatatatcacattgttcccgttcttctgcaaattataaaatattatttttaaaaatacaaaataagaataataagaagaatatattatttcttcctatatatattagcatatagttgctcaagaacaacggcaaaaataaaacatatcatatatataatatatgaacactttcaatcgtatatacacaaatatacctattttctacagccagtaaacttgtgattaaaagtcgatatacatattgtagaaataaagagtcatgtttttgctaacatgttaatatttgtgcttaatttgatattctaatacatatgcatggatgttaactttttagttgaagttagagaacggatcttttgttttaaacaatacataaacgcattacgcatacgtattaatgtaagattacatgaacgaggggagtttaaatgctttgatgacgtgaggctgagcgttaagaaacgacatcagctaaagcaattcgttttttttctaagtagcgaaatgaaattgagaatataaaggaaaaagaacgatgaatctgaatcccccaaagtagaaaattcgtgtcacacgtgaaaaaagttatagatttaaattctctttttttattgccaagaaaataaataaataaaaagtccaaagagaaaataaaattggaaaagaaaaagtgtaaaagaaggagccaagattttcacacaacctaaagttttgtttaaaaaaaaaaaatcaatttctcgtgattcaatcgcattatcatataagcttttccgtgatacaaaagggattttataatagtaaattgttaaatttaatatcttcaattttcgtaattaattgacgattatttgatgttattaaaagaaaaaaagaatagtaacgctggatactttttgccacgtgtcttaatcccaggtgctcagagtggaagcaggttactttggttctggtgttgttactaatgctgcaccacatttttatcgtcgtcgaacaacactcacctatatatggcgcgtttacttcacttcctccttcttgtcctgtgtctgtctgtcgcagttaatttatctactggtcaacgaaagatctacactctgtagatttgatttaagtttcgctgtttgatttttaaaaacatttataattatatgttgttattttcgacaacttacatgttcatgtgtagttagttatttgatacgcaataatatagtgtagagcaggttttgacaagactttagacaaaaaatctaaagcaataatatagtgttacgttttcatttttgtctttccgttttaaaattttaattattgattcatctttgaaagcgattatatttaaagactgacaaaaaaagcagcaacaattggctcttctcccaaaagtcaaagctaaaaacgctaaatctttcactttcgatcataaacacaacagtctcattcaaatattaaaacattgtgacatctcatttcttaaattttgtattatccaccattctggacgaaaaaaatgtagttatcaaatagcacggatttaaatgcgtttttttctttcctaaactacaggagtaaaagaatatgtatgtaattattatttccttcagcaaagcagattttagaacatactactactcataatataaaacattaataaaatatgaataacgccggagattacggcccaaagattgggcaagcctcaaaatttacgcaatattattattattatttctaattctctccttcgtcacatcccatgcagtcaaatgtcatgaataccctttacccattaactctatcaagccatggcacgtaagggcattcgcgacatttcgtatatgcaaacgggtaaagcttaatacaacaaagattgttctcaaagtttaaaaaaacagtaaatatcatataaacgaaatcgagctttcgattatggagtggctacgattgcccatggcagatgcaaaatcggcttcttcttctcattctcttcagctcctctcatcttcttcaatggaggttgttgctgcggggacgacgacgacgttggtgggttgcacgaactcgctgaccacgaatcgtttgagctttcgtcgctattgaaagggtttgcatcaatcacgcagcttggactgttcaacgatgatgatgaatcgtgactcttgcgtttcttggaagattggatttggatctgtaaaccgatgcggtccactggtagttggaggattagatcgtagcaagttttcaccttttcctgttaatgcacgagagttgtttgagaaaatgactgagtgaaaacaagtagagagatgattagagaagctaaccttggttaagttaaggacaccgaggagattagtttggtatgaaagagggtcaaagggatcaacttgctctataattcgcatcatggtagctgcggcaactactgatgggaggtacccgacaaatcttgaatctgacaaagacaattgaggaagataagacaagaatgtaagatgattactcagattcagcagatggtaaaacgaaatggagtggcttttttctttttgtcgtttacgaaccggagattacagagaggaggagacggtggcatttgttgaggaaatcccagtgagcattgttcttaagtcccaatctcctgataatgtggtctacgaacgaaattggagtaatgagatgcatcttccactcgagagtagacagaatcagtagctccattctctgtatggtttttgcttcaaacacatactttgtctcctccacctgcaaacccccaaaaaaacagagagatgagaacagagggataaaagacttaaactttaaggaaatttattgcaagtatcatcatttacttgaaagtctagaagaagagggacttgggtttcttcgactttagcagctaatgagagacacgcgacagaaacgagctgaagcatccatggtttgtctctctgtaagctgtagctacagatgaacttatcgagataagttatggctaaaacagctgctaaagtagagaagccataatgagcgttgactctcagaatccaaccaacagcttcttttcgatccgtggaaagataaacatcatcgagacagctgagtccttgttcttcttctttggagaagagtgtaaccagatcttcatcttcccagaacaaatcttgttgcaaaacaacgaatggagaagaagaagaagacaaggaagagttttcttcaacttcttctccttcatcgtcccatttctcttcttcgcagtagagagcatcaagaagaaacgaattgctctgttcttctctactttcttcctccttccgaatcgccattgtgggggactaaactcaagaatgagaagaaagataagatctttctcttctcttctatattgttgttgatttagttattgggttttggctcagagcattacacggaagaagataagatgatagagagaaaatctctcggagagagactcatctttcctctctatggaaacgtgcagtggttagcttagcaggggagagctacaaaagagagactagagagagaaagagagaggaaaaagctggaagtgggtttcggagagtgataagaagagagattgatttatgagagaaggccgagagatggtttttacgtttgtcttttactaatatattatttgtttttcttgttgtgattatttaatgtggaatttctttttctttattttttattaaatgtgtgatttcttttgctgtttcccgctttacccactttttactcatttggagtagagatcgagaaaccaaagtgcagtaaaatctgtcggctaaattctactacttttgggctatttgtcaacaataatgtttttgttagaacctaaagatattgctatacattgaccaaataacctttttctaattgcatctgatcacaagtgcgatgattatacgccgataagttccgtttcttaaagttaaagacagaaccaaaacctttttttgtttttaacataattttaactcaagaggatgatgaacacacaaaaccaaggatttagagtaataattcaatataatctgcgatctggttaaacatgaaaagatccaaacttctcaataagtttcactgaccaactcaaaaattaaccatcacgctagcaatagcacaaggaagatgatataaaaaaaacaaaacaaagaaattcgtctgccaaattctagaaaacaccataactataatctatacatcatgaccacttcccgtcaaattctaaacgccaaacgctctagtatggaggaggtgggtattgtcctggatatggacctggaaacaagaagaaaaaagatcaaccaccactgactatagttagagacaagcaaatgcgatcaattgcagcatagaacaggaaagaaaggaaggtaccttgtgggtaatatgatggttgcggagggtatggttgaggagggtaagctgaggatggcggaggaggtgggtaagctgaagggatcggagggtagcccgaggttgagggaggtggataggcagatggctgaggaggataccctgaagctggagggtatcctgatggctgagggtattgttgtacttgtgggtatagagatggtccagagtatggtggtgctgttgaatacggagatgcagaaggcggtgctgagtattgaggtacgtgaggtgcatacggtgctgatggcgcagacccgtaattatgtttctgcatacaagagtggattgtgtgtttagccttttgtttataatggaacatgttaaccaatgttgctaattgaggctcgacttacctttgctcccgcataatgcagtaggagttgtacttctccagcgaatctacaagacagaaaggttgatgtttttcacaaggcttttaatcaaaaaagtaatcttttacaaggagcaatcgctgaggacaagctaccaaaatcttggcacattgtaaccgattttccaggaatttaagaaaacaaaacacatagccatggattaaaaaacacataactttctctttttcaaaaacaaaaatggaatacctcaagagaccagttttaagaaattctaatttgatgctacaatgtttaaacgcaacttcacatctctttactgaggtaacctaacaacagacaatagaagctccatttatgtcaaaatgtctagttatctttcataagttccagagaaacctaatcaaaatgctacatcaattgtgagtgtgctcaatgtagaaacagaacattcgaacaagtagttcacacagattaacaatttaggacacaaaaacacacataacgactctgatcagtgagcaaaaccatgtcagcactgtaagtaaatgacaagaacaaagcaaagcaaagcaaagcaactggcgaaactatatattcaagcactatatagtagaaaccacatcaaaaagttgcaccaaaatcagctagacaaatgtgaaccatgcaataatcgagattaccaaacatgatacttaatggaaaaggaacaaaaactagtaaagccaatgtaattacctcccagttttactctgcaaagtccaggtacagtcgtcgtattcctgagaaagaactttctgcaattgaatcctaataacaaccaaacaacaaaagactcaattccaaatccaaagcgggtattaaaaagcataacaaggcaatgataagaagtgacacatacgttgcattgccaatgaagtcatcagtggagagagtgttgctattccagacagcaaccttaagatccctaagcccttcaatcaaagtgaagataaacttctcttggaaaacagcgttctttccaccatctgaaaaaacaaacccatcaatcaaattcattgaaagatcttaactttgttcaattttttctggatctgaacaaattatgaataaaagaggtggtattaaaaataacctgtgcaggttctggtacggtgacttctgccaccatactcaaggacgacgtatggatcttgtcttgaaaaccattccgtgtctttcaatttctggcacccaacaactgacaaatcaaaagaatcccagaaattttaaaagttaacatttcaacggatcatagataaggttgaagaacataatagaattggggatgtgagaaaggtacgaaccagtgacctcgagaatctggccttgtatacccgccatcatcgacatgaatttggaagaaaacaatcgagattgagaaaaagaaggtaatgatgaagatgatgaattcagagagataattccgtgacgtgagactttaaataaaaataaaatggcgactttgattgatgatgaaataacgcagaacttgctttcaagaaccagacgcgtctcgtaaggcgttgaccgtaattttgacttttcattagatttaggtacgcgttttttaaatattattatttccttaactattaaagtctagatgttgataatctttgattcataaaatcaaaatttttacaaacaattacaagcacaaccacacaatagtgataattctatggcatgtcaccattaaagatagattcacgacaatcaataagtaaataaatatagatatagcttcgctttgttatttgctagacaccacttattatcttgtggatgatattataaggtgtggctgaagaacggagaccaaaataaagggagtgtctttcttatgtatttactaggatgcgtccaatggcatgatggttatagattacagtgtagctgttgcaatcatcttggttcctttgaaagttctaatatcatcagatgacagacaaaaaaaaaaaaagtttccccttggaacaagtcatccaaatataaaggcagtaacctggaaatagctttctttgttcgtataatttttgttcaacgtcgcgccatttcaaaaaattgtcgaccaagagaaaatggaccataaatccgatatgttgttttcttgatacagttctattgcttggtccaataaaaatcgaaaccaacttgtctattgcttggtacttcgatttctcattctatttctcaaaatcagcaagtaaatgattctcaactcttacaagtctagatgaaatttagctacctattgcaacctctcttgttataagccaatccaagtttatatagtaactcaatttctcaagtaatatatgaacactaagagtcccttaaactgaatatcttgtacctcatattatttccttctcctttgaggaaatcctagccctacattcccagtgttgcccactgcttgtatcggttcaaccaaaccttttgtattcttccctagcgtctcaccctgcattagcatttccccagtaatcataaattacggtgacaccaaataacatcacaactcacaagtgataagatccacaagttacctccttccaacccatgtttcccattatcctccttgcataacttccagatccaaatgatagctccaatgcttctgctacagtatcctcttcagaaccagtgtcgggaactgaatgctcgtccgtgttatggtccactgttgttcctttttgacctggtccaacaccatatccaccatgcaaatttcttctctcagcggctctatctctgtatgaacagcttctctgctgataaacaacaaggagcaacaatgaaaatactagcttactagggttctaataacactaaactatgccttcgaaatactcttaacagatttaagtttctcactgaatttccccatacacagagctttagaaaaatgtctcctgctagatattgtgcagaagttcaagcagcaggatgtttacatccttcacaaacattctgaaacataaaatacaagaatccagccatgaaggtgaggtccgagtacctcttcaatcatgttgacttcatctcgtggcttcactgtgagtttgcagtcagtttttggtttcaccttcttagcttcgcgttttgtctcttgctagatatttggcaaaaattcaagaagcagggtgttaatatccttcacaaacagtttgaaacaaaaaatagaagaattcagccatgaagatggatttgcagtacctcttcaaacatgtcgacttcacaaggcttcaccgtaagtttgcagtcagcttttggttttaccttcttagctttgcgttttgtcttctgctagatatttgacagaatctcaagaggtgtttacatccttcacaaacattttcaaacataaaatacaagaattcagccatgaaggtggatttggagtacctcttcaatcatgtctacttcactaggcttcactgtaagtttgctggccctttttggtttccccttcttggctttgcgttttgtatcaggattttgccattcagttgaaatatcagggaattcccaatcttttgttgggttggaggcgtcatatactgacaaggatgcaaggtatttggcactaggatttcgaagtttatagacctgacctggaataaatcatttgaaaatcaaattcgttttctacgtttccccatataacagagcacaccaggttaacaaaaatcgattgcagcaacacaatatttattcacatttcacaggaacaaggctcggttagaaggaaaatggtaaacctgtcctaactcgcactaggtgaagccgagcttcacaaattggggcagtttttaaaagtgtgccaccagaaaccacagatggatgaaggttcgccgactgtctgaccagcctccctactaacctagccacctgttcattgtcagcttctctggtttcacatacaagtttccaatcccacaaatcaacagacgggatctcaggcagggtcttcccaggggattcgatgacttgaccatattgtgctagccatctttcttcctcgcttgaaggagcagctagaaatgaaacagtgagcatgaaagctatgaatatgagccgaagaaaacacatcatcgaagtaataagatccccctaaacagcactacgggggttagttaattatttcaaattttaagatcagcttacgagagaaaaatactatccaccatgaggaataaggatttatttagcttcatatatcaaaaaccatgaccaagaaagctgatatggagcggaaataaagcaaatgaaaagaacagaagagataaaaaccttcaccaaagttctcttcttgtggatcaaaatcttcttcaggaatccattctccctcttcaagttcctcagcatcatcatctcctggagaacaaacacaatttgtagcttctctccttaaattccaaacttgaagagcaaattcattccaacgtatgcaatataaaattctaataagcattatcccaggcaaagaccattagctgacaacatctgacaatcctgattattttccccagaagccctctcatagctggaagcactgggatgttgattataaccatccagataaagttcaattagtgtatcttccaccctgataaaaaagtttcataaaccatttgatgaaaaaacatatattaatctccatgatctactaaaggatataaccaccaaccatgaggaaggtcgttgacgatgttcaggttcctggtcatttgggcaccctgttgactctttcgagcaaataacgtgtctatcagtatcagttaaatattatagatgctactcaataatccaccggaacactagatgaaaatttacctgaaggagtttctccaggattactcagagaaacttcacatccattttcaacattctcagcctgagaaaatgcacattttctgcctaagtcatcttcagatggctcataggtgacaatatctccaggagggttcaccgaagactcgtcgtattccaagggaacatattcgccattttcatgcttgtagtaacgaccatccttgctacaataataccaaccagcatttgggtcatggtaaaacccactactgcaattcacaaatcgaaacaaaagttagcatgcaaaaatgaatagagtccttagttcaatggaattaagcatcaatctcaataaagtctctgcctttttcatcactctttatagttaaaaacgataaatagcagataaagcttttaacactaagacaatcaaacctaaacacaatggacaatttctgcttatattcaatcaaaactaaagcaaactaaggaaattaggctatagaatcgatagatttgggaagagacgtagcctgtgatggatatatagctgcgtatcgctgtcccaaacgtaggagtcttcttccttgggttcctgcaactctttatcgtcgtcgggcatgaggattgattgctggaatctcaacgaaacaaccaaagattgcaaccaaagattgctgaaactagatcctggacaatcaaattgagcaaaagatcattactttgacgatgatgattcaatcaataatcgcttttcaaattttggtttcaaaaactggaatctacagttctgttgaagagaaacgaggaggagggtaactcggaaaaccatctctcgtttccgaatccaatttacggtttactgttaaaaaaccggagtgttacggtttaggcccagtaaggtttaggcccatcaagtagaaacccaagtcaatgacagaagcttttattagtgaagtctttctaactgtattgttttctcattcaccatctcatgttatcgtcaaagggaatgtgattgcaagaagttattaccagaatcatacactgaatataagaatcaatgaagctaagtcctaattcctaacaaattattgttgttgaaagagaaaaaaacaatagaagataactcaaagaagtatgtagagagaaagagtgagaaaagggaagaagaatgacgaatgcaatgacgtgagattcaactcctaccaaaattcctatcaactgtttttgttgtaattagacatgtcattgtcattgctgacaaaataaggaagacaaaacaaatccgacttggagataagcccgtttagatttattcaactcctatcataaggatatcaaatttttcccatatcatcaactttagaaagtttctcaaatatctgcaacgattgatctctttacttctttaaaaaacattaggttatgggtccgttttgtgattgtaaaagcgacacgtgattgattagcaacatttaaatccatatcttgttgaacaaaacggtgcagtttcggactttcgttaccatatattgtagttgttttgttatactgtatatataaagcaagcgttatctcccaaacttcactctcttaccttgcctcttgcttcaacctcctaagcacattcttatctctttctgaaacgagttcccaaattagctctacaaaaaccaggatcttgatttctcatcagttaaacatgggaactcctgtcgaagtctctaagctccatttcttgctcttccctttcatggctcatggccatatgataccaactctagacatggctaagctctttgccaccaaaggagctaaatccactatcctcactacacctctcaatgccaagctcttcttcgagaaacccatcaaatcattcaaccaagacaacccgggactcgaagacatcaccatccagatccttaatttcccttgcacagagcttggtttgcctgatggctgtgagaatactgatttcatcttctccacacctgacctaaacgtaggtgacttgagtcaaaagtttttactcgcaatgaaatatttcgaagagccactagaggagctcctcgtgacaatgagaccagactgtcttgtcggtaacatgttcttcccttggtccactaaagttgctgagaagttcggagtaccgagacttgtgttccacggcacaggctacttctctttatgtgcttctcattgcataaggctccctaagaatgtggcaacaagttctgagccctttgtgattcctgatctcccgggagacattttgattacagaggaacaggtcatggagacagaagaagagtctgtaatggggaggtttatgaaggcaataagagactcagagagagatagctttggcgtgttggtgaacagcttctacgagcttgaacaggcttactcagattatttcaagagctttgtggcgaaaagagcgtggcatatcggtccgctttccttaggaaatagaaagttcgaggagaaagcagaaagaggcaaaaaggcaagcattgatgagcatgaatgtttgaaatggctcgactccaagaaatgtgattcagtgatttacatggcctttggaaccatgtctagctttaaaaacgagcagctgatagagattgcagctggtttagatatgtcaggacatgattttgtctgggtggttaacagaaaaggcagccaaggtaccatagacatcactctctttgcagcaaaatcctctgtttttgttttagagaaaaaccaatgatctaattaggattctactgtttcaaactctaacttttgcgtttgcattacatataaatagttgagaaggaagattggttaccagaggggtttgaagagaagaccaagggaaaaggattgataatccgagggtgggcgccacaagtgctgatacttgagcacaaagcaattggcggatttttgacgcattgtggatggaactcgttattagaaggggtggcagcgggcctgccaatggtgacatggcccgtgggagccgagcagttctacaacgagaaattggtgacacaagtgttgaaaacaggagtgagtgtgggagtgaagaagatgatgcaagtagttggagacttcattagcagagagaaagtggagggagcggtgagggaagtgatggttggagaagagaggaggaaacgggccaaggagttagcagaaatggcgaaaaatgcggtgaaagaaggaggatcttcagatctagaggtagataggttgatggaagagcttacgttagttaaactgcaaaaagagaaggtataaagaagttgaatgtattgcaagttatggaacaataatgtttttgtaattctgatggtttgagttacaacagtaaaagattgtatttgttcattcaaatttacaatggatgatcttttagtttgtagtattggtaagtgaatgtgaagttaggttcttgagccatcaggacgcaaacccaacattagttccgtttagatttgttcgttctgttaaaagaaagaacaaaaaccataaaagtctactaagatttggtacacaccaatatcaaatacctaacctttaattctttctaaaaagtaaaataattttaaaagaaatttaaattacaagacattttatttgattagcatcgtcaaactatttctagaagaaacatatctgttgggtgactccatgatattatataacatcacttttatgcttatcgacttcagtttttcttctaacaacttgtcttatttatgtattacaactccattaagagtttttttggtttgttctttcgatcagtcacatcgatatatacggctaaaaattcatctttttaaaagtccaaaaggcgaatggctatatacgttcttctaagtcctgctaaaccggtggaccatataacctcacttttctctattgcaatgacccaaattgatcaagacaagtaacccaatgcattgaccaagtcaagtaacccattgctttgtattgatgttatcggtgtgtatgtgtatgtgttgtgtcatgattaaaaaagtcaggaaaacaaaataattgttataattaatacaataatattaatccggccgtgatttttttttatattggtcaattaaccacactttgttttggattaacttgattgtatatataccttatgttttttctcttctccctttttcttttcataataaattaaacatgatttattaatctggaaattagtttacaagttacaaggttttggttccaaaagaccttgaaaactgacactactctggcacgttaagagagaaagtaccaaagaaaccaaaactagagacgtatgcaacgacgtcagtatccgttacccattaatcatctaaacccaaattttggtgctttatacgttatatatactccacactcttgcaaccattattatatatacaacgaggaaaaatagtactattttctacgaacttcagaatctttcgtctctcttaattatttttctcaaatttctcgaaacatctagttttcttttcaaccagccaatcatgggtagtgatcatcatcatcgaaagctccacgttatgttcttccctttcatggcttatggtcacatgataccaactctagacatggctaagcttttctctagcagaggagccaaatccacaatcctcaccacatctctcaactccaagatcctccaaaaacccatcgacacattcaagaatctgaatccgggtctcgaaatcgacatccagatcttcaatttcccttgcgtggagctggggttaccagaaggatgtgaaaacgttgatttcttcacttcaaacaacaatgatgataaaaacgagatgatcgtgaaattctttttctcgacaaggtttttcaaagaccagcttgagaaactcctcgggacaacgagaccagactgtcttatcgccgacatgttcttcccctgggctactgaagctgctgggaagttcaatgtgccaagacttgtgttccacggcactggctacttctctttatgcgctggttattgcatcggagtgcataaaccacagaagagagtggcttcaagctctgagccatttgtgattcccgagctccctgggaacattgtgataactgaagaacagatcatagatggcgatggagaatccgacatgggaaagtttatgactgaagttagggaatcggaagtgaagagctcaggagttgttttgaatagtttctacgagctagaacatgattacgccgatttttacaaaagttgtgtacaaaagagagcgtggcatatcggtccgctatcggtttacaacaggggatttgaggagaaggctgagagaggaaagaaagcgaacattgatgaggctgaatgcctcaaatggcttgactccaagaaaccaaattcagtcatttatgtttcctttgggagcgtggctttcttcaagaatgaacagttattcgagatcgctgcagggttagaagcttccggtacaagtttcatttgggttgttaggaaaaccaaaggtattgaaattgacgtttgaagcctatattatatagctgtaatttgggtagctttgattttaatctgacacaagatttggtgtgaacagatgatagagaagaatggttaccagaagggttcgaagagagggtgaaagggaaaggtatgataataagaggatgggcaccacaggtgctgatacttgaccaccaagcaaccggtgggtttgtgacccattgcggctggaactcgcttcttgaaggagtggctgcagggctaccaatggtgacatggcctgtaggagcggagcaattctacaatgagaaattggttacgcaagtgctcagaacaggagtgagcgtgggagcgagcaagcatatgaaagttatgatgggagatttcattagcagagagaaagtggataaagcggtgagggaggttttggctggggaagcagcagaggagaggcggagacgggcaaagaagctagcggcgatggctaaagctgccgtggaagaaggagggtcttccttcaacgatctaaacagcttcatggaagagtttagttcataatcttcatatatatagattctatttagaaattccatagcagaagtaagatgaaagctaatgtaaaatataagagatatgagttaaattcaaatggcagcaacctctaccatagacatcactctaagtctctattatcttcagcataatcctctgttttgttaggagaaaatcaatggttcaagattcactattttcaaatgctaacaatgaatttgttgaacaataatggtggaccactaacccacacaaggcgagttgcaatttgtattcttctaactggtggaccactaacccacacattattgtctcactttcctctaatatacagacccaatccattagagaaataaataattccgtaaatggcaaaacaaaagtataactgtttttatttacttggtattttttcgtacatgtacaacaataaagtactagatgtttacatagacgattagtaaaacactttattgtcatgattaagacatttaccaaaataataagttaaacaacaagcgacgtatgcaaagacgtaccggaaacaagtgacgtatgtcacgacgtcaaaatcgttattacccaaaatagtctccccagaattcaagtttccgtgtggattttatgtgctatatatagatatgtataaaagtataagctcttaccacatcattcaacacgacaagaaaacatcacttttctaggagcttcaaaatctctgatttctttttattattttttaaattttcttttcgatcaaagtcaaacatgagtagtgatcctcatcgtaagctccatgttgtgttcttccctttcatggcttatggtcacatgataccaactctagacatggctaagcttttctctagcagaggagccaaatctacaatcctcaccacacctctcaactccaagatcttccaaaaacccatcgaaagattcaagaacctgaatccgagtttcgaaatcgacatccagatcttcgatttcccttgcgtggatctcgggttaccagaaggatgcgaaaacgtcgatttcttcacctcaaacaacaatgatgatagacagtatctgaccttgaagttctttaagtcgacaaggtttttcaaagatcagcttgagaagctcctcgagacaacgagaccagactgtcttatcgccgacatgttcttcccctgggctacggaagctgctgagaagttcaatgtgccaagacttgtgttccacggtactggctacttttctttatgctctgaatattgcatcagagtgcataacccacaaaacatagtagcttcaaggtacgagccatttgtgattcctgatctcccggggaacatagtgataactcaagaacagatagcagaccgtgacgaagaaagcgagatggggaagtttatgattgaggtcaaagaatctgatgtgaagagctcaggtgttattgtaaacagcttctacgagcttgaacctgattacgccgacttttacaagagtgttgtactgaagagagcgtggcatatcggtccgctttcggtttacaacagaggatttgaggagaaggctgagagaggaaagaaagcaagcattaatgaggttgaatgcctcaaatggcttgactccaagaaaccagattcagtcatttacatttcttttgggagcgtggcttgcttcaagaacgagcagctattcgagatcgctgcaggattagaaacttctggagcaaatttcatctgggttgttaggaaaaacataggtattgaaaaagaagaatggttaccagaagggttcgaagagagggtgaaaggaaaagggatgattataagaggatgggcaccacaggtgctcatacttgatcatcaagcaacttgtgggtttgtgacccattgcggctggaactcgcttctggaaggagtggctgcagggctaccaatggtgacatggcctgtagcagcggagcaattctacaatgagaaattggttacgcaagtgctcagaacaggagtgagcgtgggagcgaaaaagaatgtaagaactacgggagatttcattagcagagagaaagtggttaaagcggtgagggaggtgttggttggggaagaggcggatgagaggcgggagagggcaaagaagttggcagagatggctaaagctgccgtggaaggagggtcttctttcaacgatctaaacagcttcatagaagagtttacctcgtaataagcagagaatatggcagagaagaggctgtgatggccaaagccggcggtggagaaaaaagggtcttcgtttctcgatttgaatagcttcattgaaaagacctcagtaagaaattgaaaattagttcgattctgcttagtctttgtcttggtgataagagtagacctgtgctacaataaacatatatgtatcaaatataccatttgtcttcagttccgagtctgagaaatgttactcctaaagtaacaaaaattgcttctgaaaaccgaaaattgacagagaatggttacatatatacttatatcaatggaataaatagatttcgctattaactatggcagattcagatctgctccatcactgctgcttcctagctatgtagagttctcggtttcccgtttgatctgcagcgcagcccttacaacgtttccccttgtaaggatcccaatcttcttgcacggaaagcaaaaagaagtgtttagaaactgaaaagatcagaccaaaatcaaactgcagaaagaagaagaattgggatgcttaccagttttccatcagcatcaacaacgggtaatcttcggaactttgtttccagaagcaacctgaagaccaaatggttacagttcttgtaagaacgttgcttataatgtccccagaaaaatcttattgaactcattcctcctaagcctctcaacttaatgtttgcaaagcgaaaacataaagaagaagatacctggctgcatcttctaaattggtagaatcacggacaacgagaggagacggtgtcatcaagtctccaacaacttttccatatgtcttactgatcagtttctgtagttcgttaaacgtctggccaaaagagaattcaagcattatataagtaaacctcattccaaggaaattcatgcaaatgaaacaaacaatagtcctcagataaagcaaaacgtagataaacagatagggagaaacatactttccaggtactgtcgacatcagggaacaagtttgtatcattttgactgcgacctgttacaaaggacaagaggttaagttgttttcaccaaactgcgccatacaaaaccataaaacgttcatgacaacaaaactaaacatgaaagctatgtgccaacaaaactaagatccaccagaagtccagaagtgaaatcctacaagtagattatgacttaagcccttcttaactgattataatgaaactgaaagagtggtgatcatcacaccaacagaagatctaagaatacttttgagtacaaaaaacatgtatatattaccagagatggagtccaatgcaagcaaatcgtaatcagaaacaacaccaacctgcaggagaaattacagcagaggagtaagtaagacaaagcatattttgttaacttctaaatccaataaatcagtaactaaaccgacgttgcttgttattcatgactaagtttaatcacgagcttgttgttcaagactctaaacagaggaacacaatgacaaaagatatagtttcttagttttaccagtgtccaattatcgtcaattacaggcaatcccgtgactttcttctcaaccagaagttccaacgctgaaagacaaccaaaaagacaatttttacgagactagtacaaggattgactgttaaattcatggaaaatctgttcccgcataattaccatcatcgaccgacgtagagggcttaacaacgtgcaaattctgtctcggagtcatgaaatccccaactgtgtaacctccattttttgcctgaaacacccaaaagagccaaaacaaatctcaaaccataagccaaaagggttattaggtaaataaaaggatttatctaaaaggagcaaagttgactcaccggaacagagttattattattaacgctggcaggagcagcgaagaaggcagagacggtgattgacggtgaaaaagtggaggagcgacgacgattagagagaggaagaagagagaaagatgaagaagaaatcggaaggaagctttgatgatagagtgatgtaagtagtggaagtcgagttatgggcatagaattggataaagagattgaacccatattcgcttatcctctgttactcacagattccaatgaaagattaaatcttttctttatgaaatctgagagaagaaacaaaggtagaaaattttgttgaaggagagagaagtgaagaagtagaagaagagagaagcgttttgattgggtggtaaaattcggagaaaagtagagagaacttgtgatatgataggtggtggtggtggggacatagccacatatcaatttttggtatatggttgattggtcggcatatttacgtttcctttgggtcctcaatttcaaagcgatattttccatctttttttttggtcaaaactcaaaagtcagatgttaataaataaataaaagtccaatttcgatttaacaagaaaccctaatttgaaccctcttttggtttcaagtgttattggatttttatgtcgtgattgtgagattgttgagtgttgccatcagttgaaatatctagagattttgataatagttaaacctttcatacactcgaatcttttaaatattttcgaattagttcacaaatatcatcagactcaataaaagatgtgttgctggctttgctgcatgtcaaatagatacaaaaaaaaacaagtagactatatagttcatgacgcaatgtactggaaatcaaaattcatgtacgaatattctaaatccttggcgtagatgaagactttcttttttttggtaagtaatttctcattctcaaatagttgcagaaaaagtagtccaaaaaccagatcaataactgaaaccaaaaacaatggtaagatttcaaccaaacaagatgtgtatcatgtttccttagacctctactaagatttctattcgactagtcccaatcaatctagaagcaaagtgtataaaaagtttaaaatgtatttctttctcattcaaacattgtctgctgagaatgagacccattcatccatttttaccaggacacctttttaccataaaatagagcttgaaaaactggtaaaaaaaatgactagaagcaacaaccaccaacagtcaaaaggccaaagagggggatcaccagcattggccttattggtaatcaaattcatcttccgtgaacactagatcgaacaagctagaacacgcaactaaatcaaaagaacaaagcagataggtttttcctttgtggtttaaaaacgaaggtttaaaataacacaaacgcagttatgtggaggaatccaaattcccagggagaaaacgaatagcaaagaaacaactccaattgtatgggagagacaaaagccaaagatcaaatgataaaaagcaatttaagagaggttcaaggaagcgagctgctcggttgcaccaccagcagcgacactcctgagaacatccatagcctctgcaactttggccttgagagcttctggtgactccaacagatggagcacttcagtctggtccatctccaaaagcatcccagtcactttggctgcagactctgcctcaacctgctccaccaacgggtacagcacctcacccagcatctgtacaaacacacccaaagggtcacattattataatccaagcaaaaccagtctctctatttggtttttaagagattctctcaccgtcctctgttgctctggagtagcattagacagatttgaagccaaagctccaatagtcaatggcatgttgttgcccatatcatatggaggcacatcaccactaccaccacgcccttggggataccggaacatccgaccccttggatgcatctaaccaccatccaaacagaaaaaccatacgatcaactattaaaagagagccaagcaagcaaagcagcctttattgcaattaaataaggaaaagagaagaacctgttgctgcatcatgggattttgctgctgggagtgttggattcccccaggacgtcttcctcctccaggacgctgctgctgtggctgaaccataggcatgaagaaactgggtacaggacccccaccaggtctcattccaggaacaagctgctgttggtatccatacccaggctgtggcattgcataagtacaggttaatattatcccagcagtttcaaaatagatttggaaaggctcaagtatgagtatagcaactatagagctaaagaatttaaaaacttttcatgtgacttaaaagcatctgtcagcttgtaattcattatacccaaggtagaaaataaacatgtgcatatctttgtgtaaaatcgtacacggctacttaaagtagagtaacatgaagattacctggggaggaatcatggcaggaggggcctgaccatagaacatttgttgtccaataccaggaccacccgggggatacactggcatgcggggaccaacagacggctgcattgcaactggcctcacttgggaaaactgagcctattcacatcaatgcaaatactcagcagcaggagaaaaaagagatttttctgtgatacaaaaatactaggacatatgttgtttatgctttatatattgttgcacttgattataaagaagaatcagcatcagtattgataattatacgcagtgggacattctaagacttgtacatgatgggtccaattgtttagagttgaaactccaacaggcaaagtaggagtagtaagtgtatcacaagacgaggtgattccaagagaagcaaacctgtagtctgacccttctgtcttccttccgctgtgcaatagccacatagagtggcttgctttcgatcattttaccgctcaactgtgacatctgtacagtattccactgttactaacaatcaaagtcctcataaatacaatcaacaagacgatacaactgacttacagcttcagttgcttcttcgggagttgcgaaagcaacaaaacctgagcctttgcttgttccattaggatcccgcatcacctgtaatatttaataaaagaacttcttaaataatgaactaggagagtcaactcactacaaataaagagagagagagagggacattgaaccttgctagatgtaacggtaccaaaaggagaaaagatctctttaagtttctcatctgaaatgctaggatccaaattcttaacatacaagtttgaactttgaaacttgtctgcagcttccttcaaattctgttcataacggacccttaattctgtttccctctctgacttcttctgggctctaccaacataccactccttatcatcaaatttgtgcccattgagagactccacagccctagcagcatcatcagcattttcaaagttgacaaacccaaagcccttggacttcccttctccatctttcatcacgacagcacttgttatctttccatactcgccaaaagcattcttcaagtcatcatcggtagtactttccgcgagattcttcacatacacattggtgaatttcgttttgttagcagtggagtctctttcttgtctcctcaggaaaggacccacatacacttgcttgtcattgagcaacatgccgttcagtttctctatagctttctgggcagattcttcattggcgtattgcacaaacccatagccttttgactggcctgaagaatcgacagctaccttgcacgacacaatgtttccaaacgatgaaaaagtatcatgcagtgctttgtggtcgatggactcgtccaaattctgcatattatagccaggtttagcatcagaaagagagaaagaacacccaataaaaaaacttacataactaaagaaatcaactacttttgccagacttttcaatgaataatacaagatacaaattttttcgcaacaatcatctcgtcttacagcaactcaaatgtcagaaggatagagacaagcgtacttaataaaaatgttgccagcgccacttcggcgaacactaggatcacgatgagaatacataaccctaataggttttccataaagaggtatgtaattcagttcttggatcgctcttgcagctgcaacaaagacacgagataaagtaccattagaagacagaagtagcattaaaaagattgattaagcaggggataagctttccaacagcaccaaccacattgcatacatacaaacaccataaagtatcaacatttaaaacacacctcattcaaatccagtactggtactatcgagcaaaccctaaaaattggaaattgtaagaagaagtccaaataaaattaaggagactaaccgtcttggggattggtgaagttaacgtatccatagccaagagatcggcgagtgaccaaatccctacagacacgaacggtgaccacagtacccatttggccaaacgcatcgaaaagctgcgagtccgtcacattgaaatcgagatcccccacataaagcgacgtgttaccaaactgggtcgccgttgctccacctgacgtcgccggagcagaagtgaccgccgcggtcgaaccattcggagtctgaccctgaagttgaacctgcgccattatctttttttggattttcgaaacttttttgactttttttggggttttagttactcttccctcccctctcgttattagactgaaaccaaatcgaaaaccctagaatttgaaagaagaaaaagaaatcgaatcgaatgacaaaatcaacaaaactaaagccaaagtttttatcttttcgttttttttgtgtttttatgggtatatcagaggagagggaagatgaaatagggtaagaaattgccggcggcgaagcctgcgacggcgagtgagatatttgggggccgagagattctaggcgaaacaagcacaattacgatagatgaaaaagaagcattacggtttctccttttctttgcttttatattattaacccaacaaaaaaaagaaacctttaattcccctagaagaaccctaggagtgtgagattgatctcagccgttggatcgagtctgaagtaaatcgtaggattgattttagagttgctggtgaattgataaggtcgtcttccttctcgtcactttcggaaaagtcaaacagatacgcgcgtgtttgacactttcgaatctaattagtaaccaagtttgttaaaattttgtacagtgatgatattttctttgatttatcttaacatttcttaactctgattagcaatattctcactggatcttgatgaattttgattttcctaaagtaaaagttgttaatattaatatttaccgcacgattttatatggtatgcaaaaagtatcttaattaaataaccaatatgttaagatttgacttatcaaaacaattcaacttaatacacgattggccttccagtagaattgtgacacgaaagaacataagatgagagatgagattttgcaatacgcaatcatttcaaaaagcattacaatagaaagtagaaacacacaaggcatatatatatacgaagcgtcattactcatttcttaagatcctttggatattatacacaaacaaaagaggatcaacgggatacacattgactagtaaatatttccaagcctaagttaatacgactcagtgcacagtttctttctaagcttcttgttggattgcacgtctgagccttaagtccattatcaacatctccctaaagtcctatcaagataccatctcccgcatcctcactactttggttttgccaaagcagcttccccaaagttatggagtctccgaccaatgagataacggtcatcacggatagagttgtgaaggtttctaaaccagaagcagaagaggctcactgagagacaacctatccatgcgaatctgtagaccgctgagttcactactagcggatatccgagcattgggaacactcctctcgccaacacataaggcacacataaagccgttaggagtttcatcacaatcgggaacacaatctctctaagtacccataacccttgaagcatatgggtctgagatgaacctgatatggacatctatctaatggggttataacattcctcttatttttattctgttggaaaataaaaaaccaaaaacagtatcaacgagtatgtctacaatcacacatcggccaaatagatcttcaacgccaattccttaaggcttacatgcactaacataagagacaaaagacaagaatttgcagtaagcgaaggtattctagaagcattatcatagaaacacacaaggcatatggacaaacgaagcattattctaaagatcttttagtttcgtacacaaaaacaaaaaaaagagaatcatcaacggatataataatttacacatcgactaataataaatctttcaaagccatctcttaacggcttaagtacacaaaatgttaaacgcctcagtgcacagtttctttctaagcttcttgttggattgcacgtctgagcctaagtccattatcaacatctccctctcgtcctatcaagacaccatctcctgcatcctcactactttggttttggttttgattagctaaagcagcttccccaaagttatgcagtctccgaccaatgagataacggtcatcacggatagagttgtgaaggtttctaaaccagacatggcatctttttgcacagaagcagaagaggctcactgaaagacaacctatccacgcgaatctgtagaccgctgagttcacaacaagcggatatccgagcattgggaacactcctcttgccaacacataaggcacgcataaagccgttaggagtttcatgacgatcgggaacacaatctctctaagtacccataacccttgaagcctcgagaagccatcttctcttacccgctcaaactttgctctccagctatcatccactattggaagcatatgatccagcattacctgtccattgacgttgttttttagtgacaaaatatcttcttctgcggaaataagttgctgattgttggagaaaattacttaccagtctagtccagattttcaaaaagatgagcccaagagcccagtcttgatacaggaggaacacagggctttcatcaactgggactctcattgggacaatcaccaaaagctcaaacagaagtccaattagcaccggaatgataaaaacctgttcaatcaccatttgaaaagtacagaatccacatttagtagagtttagagtttctcgtatattgaaaatttaacagcacaaaacacttacccatatggctaacagcaccgagctcttgaatacaatcccacaccatttccatatttggttaagcaagactgaagtcctctttgacttgacatgctcgatagcatacctggccccagatatggtagtccaaaaggcatatgtgccaatgacgaaagcatacagatctacatatttttagggaatactgttaataatgtgtaacccgtgccaaagaatgactcagaagatcaaaattaacaaacattaccattgcacttgatgccatgagttattggaagaatgggaatggcactgaatagagcacgtcccagcgaaactggcacaactatcaatgctgaattgaagagaagaagagtcacccatgcaacaagtagaaggagaattatccggaccacaaagttgtacctgctaaaaatatacattcatatcaggggaagccctaatgggagtcttaaagtacttagtcaactctatataccaagcgaaaagtcctgttaatttattcaagtatgccaaaattcttaatatcaaacaagctattagcttatttttaaagtaagaacttactcagaatcagattgttcgtcatcatcttcatattcctcacccgtgttgacattcccagcacggaggcgacttctgttagggtcatcagctactggaagcgcagccatggccctgtcaggtcctccgacctgcaacacttgtgctctgttctgccttcctggttcaccatttccattgtcctgaccaatgttgtcttctggtcttggcaagaggaagtctgttaaaccaagcgcccaaccaaccccagtgaaccagcagcgtagaagggacttaattgtggtccgaagtctgaaatgctcgatgataaatggaatgcatatttgaaacagaagcatgtcggcgggaatctcagtgaatgggtcggatacactgcatatatgcccaagttaggaaagacctaatcaaacacaaaatctccaaaaacaagaggttagtcaatatttcttacgatatgtcaagtggaaagattgaaggagccatccggatcgcaagtttgactggtaaaaataccagcatcacaatcaaacttccatacactgcaactgataacagtaccctccgagcatgcttgtgcactggatcatcaatcaaatctcggaatggattgtaattaggatctgctggatcacgaaggaaatacagaactccaggacgaagaacctgcaattggcacaaagtgaaaagatatatttagatagcagcagcgaaaaaaactatttctagaatgaaaatgagtagggacaacacagtacccctcgaagaaggctgacgaagatgcttatttgcaacatgtacatgattccaacaacccaatgaacaagtgagcttgccagaggagaaattgataaaaactgtaccctgtgggacattgttttaccgaacatcctaacagtgcaaacatctagccaccaaccacacatcagaggaaagaccccaagctcgatgaccaaaagaaaggcaactttgatcatggtcatcagatgcctcattgctgccaagaactgtctaaggagggatggtacagcttctactatagatgcaataccataaaatcttccaacagtcagtggctcacccttggcatatcgaatcagtgcaatgatcccaaggtaaaggaacaccagaaatacgataaacatgtacccaacagccagagttgtaatatcagaaagctttgaggccccaacagtagaacctttcaggagatcagtagcaactgatagcgtattgtttgctccattcaattcacttccgttgactttcatcatttcagtgagctgaccaagcagcccatttccttggccctcgctagtcaaattcgagacagcagtcagcgcactcttcagagtaatattttccaatgagagtccggtatctgtaagatgcaatgatgcagccacagcagggcctctagcagcagcaaaaagccatgacacgtgatacaatataatccgtcccaaggtaaagggcacgaagataacaacaccaaggaatatcatattgcttgctagaacctgcaaaattatgcacatcatgaagatttaataagggccaatagtgaagaagaaggaacatagaatttaaaatatacattgccaaaaagtagaaacatcaacttacagtaaaggcattctcaaccaaatgaaacactggaccttgcattccaaccagctcatcaaatggaacgtcttctgcaccatcagcgtcatccaacccatcaaacatctgttcaacctgagcctcaagacgagctgcttgtatgtccaaccttgccagaacattttcaggattccttctagcaatctgaccaaccgcagcaccctgatccccagcatcttcaccattcccctctccagcaagattcctattagcctgtccagcaggtcttcttgcagcacgagcaccatttctgtccacatcatcatctctctcttcttgtcccccaagctctcgtaagtgcctaaagtagtcccttaatgaagtagctccaaggaagatgaagacaatacttgcagatagtaagaacccatgcaagcaatcagtgagaattactgtggtggagatgtggcttaagaacaacctttgagcttcaccaaaagttcgcacgaaagccaaacgccatatccaaaatgtaatgaaaggtatagtgagaagccagacagaaagcacaaaactcaaccgcagaaagaactgtaaaacatggcaagctttcatagcaatgccaactacaaactcctggaaagggagccttgacggagcattgtcagcatatactggggagaatgaaaaaggatgcttgcaaacctgcagagatgaaattaacaataagcacgtgttctcttctatgtggaactcctacttaagaaacacatattaaaagagaagactttaaactgtcaacgttgaatatgagcacacagaaatatgcaattgcccattcatttacccatatcaaaattcctaaaaggcattcaaatcaacacgaatccagatcttaattagaatacgaatcttcaaaatctcaacaatcaaataataaagaggaaaagaaacaaaacctcgcattgacgagcgttgctgtgattaagccactgaaggagacaatcctggtgaacaaatttgatacttccgctacaggcacacggataccgaagcggattgtctgcatcaccaggatttctgcagatcctgcaaacgtcctcttcatcttcgtcatcatcaacgtacctcgatcctgtcgccgtcgaaactgcaggatccatgtttgagaaaggattgggtgatgcctgattcggcgaggaagaggaagaagaagaagatacggaaggctcggagacgacctcagaagcagccgcgccagagatggacaacgaatcggccggggaaatctccatagagaaatccgggctatgaattacgtattgcgcagacggtggtaacggagacggcaacggcggagcgagtcgactcggtgagtctgataacgccgagctaagaggaaaggcgtcgtctatcgcgaataattattatcctcgagaattaaaatagaaaaagatcggaaaaaaaatcaaagacaccgagaaaattgattatatggtaggcctaaccgggtcttgtaaaccggtagttgacgaaattgaccttccctcttgcacatttaatgacggtttttgtcggttacgcgtctttagtctttgttgggtttgggccttaaattgtaacagactaagcccatctcatttttttttcttttttttttgctgaatcagaaacaaaatcaatggctatcttttgctgctactgctgaattacgaaaattctgtgaggttgaggaagcagagtgaagagaaagatagagagataagaagaagccatgggttcgatttcgatgcacataactccctctactgctctccctatacgccatttcagagctagagtctcttgttgctcttctggtaatttcgtttttcctccgtttgtgagaattgcatgtgattgtcgaattatagtaattgtcgattgtttgatggcttttcaaatcgagaaaatgcttgagcttatatctttgttgagtattttagaacaatcttttgtaggaaaatgcagtgactatgactgtctttttgattattcttggtggagacaacaaattaacaaaagaatgtgtaataattcttccaaagagacacattgggattgacttaagattagcgttgttgtgtagggcatgtatcatttatcaaagatgttgctgccactgaacctccaatgcatcttcatcacttactcaaagtgcttcaaacaagaggtaaaataatgctcaattttgttcctcatttatgtccaaacttatgtattcgtttcttttcatcacttattctggatttgtaataatggagaaagggaaacttatggttcttaaagtctcagttgcttcatatatcttctgcaggtgagacaatcatatctcctggagctaagcagggactgatccctcttgctattccgctttcgaagaattcgtcaggtaagaccacactttcgatagaatccattagctttttccaggagcttgtctttagttttgtttttctggtttttttttttgtctaagtaggctctgttactgcgcttttgagatggcctactgctccaccagggtaagagatttggatctctttcttggtaactcttgcagtagtaaaaatatgttgttgggttattcttggtttttaacttttttgtattcgagaacagaatggatatgccggttgtggaagtttggaggagtggagtcaggcttatagctagaaatgtaaagacttctcattctgtttatacgtagcttatccttttaagaggatttatgtcttttttgtgttaccaagaaacaatcttacattttttgatattcaggtagatgaatacattcaccggattctagttgaagaagatgcacaagagttgacagaactatatcgtgcttcgggagaggcaggtgaaaaactttacgaaaagggtgcttttgctgaatctgaaattgacaatctcgatgtctatgttttgaaaaaggcaagactgaaaaactcatgacttatagataaaaggttatgtacaccacaataaacagtatttgcttttgttttgtatcgtctaggttggactgtttccagatttgttggagcggaaagtattacggcattttgatgaaggagatcatgtaagacatttgacgcatatgatatgacattctattatcatgaatctctcttctgtgacactttttcaggacattttcttctttttgtctatggaaggtttcagctatggtgacaggagaattttacacaaagaaagacctctttccaggatttggacgaccttttgtatattatgcaaacatactacagaagtttgtaaactttacatacctaaaacatatctccattttattttcgtagagaaagatgtagccacttatcttcagattcttattcgcagggtagggcggaatgtagaagcaaaagatgcggctagggtagcattgagatcaccgtggtggacattaggatgtccgtatgaggtatgacaaaagtttttttgttcttctttttcggttgtactgagttttaaagcatagagacatattcatggtcatggtatcttgaaaacatgcaggaggttgctagtatagcacaatgggaagacgagcagatcgaattcataagggaaaaagtgagtgatgaaggtcgttttgaagatttgcataaaggcaaagctccaatccaagttgcgttggatgttgcggcttttctcttggatttggcttctatcgaaggaacttggtccgaatctttaaaccatattgctaaatgttatgaggaagctggattacaccatatctctaatttcgttttgtacacagattgaatccatattaatgtatgttcttcacaacactttccatgtatgaatcagagaactcactaccctttttcacttggaagatctttgcagctggatcaaaagagtaagcaagcttgtgcaagatccatatcgactttgcaagttttaagaaggcctggtaaaatgcagtcctcgggtggccacctcctgtcacgtagtcacgctggtctagatttccaaagaaagaagcttccatctttgggtggactaagaggagctacttgctcctgcagaatataccaaagttggaatcagggtttgtacctagagcatctagtggatccatgtccttgagagcaagaaactggcggaaaaaggtgtctgtgtcatcatcggccataaccgtagcactctctgagtttactgagaagttcttctgctgaaacccactgaacatcctttggcatatgtatgattcaaatgcatattccttgtgaggcctcttggcgtaaacaacatcaggctcaatagaattggctgcagtatcaagatcccatcctgctgctttcatcatgttgattagcggcttggagaaatcatgcacaactttagcagcagcttcgtaagtagatacaaagagttcagtagtcaagtcaggaaactgtaaatttccatctccaccagaaccttggtttgtagacattcctcttaacttaagattcttctcaagcttaagccgtttctggtttgcttcctcaatcttctgcagcatctgcgtgatctcggaatccttgttctgaatctcagactgaaacttcttcaccatgacctcataagtcttcaacaaactctgctgctcttgaatctctgcagctaaacgagagtcttgtggagagacacatacaggcttggggttattctctctgtaaaaatgcttcatttcggaaagattcttgagttcagaaatgacaactttgtccgctgcctgaatcttctcgggatcgtaaggagtatgagcactttgaagctcgatataagcagatttcaaagacgagatgtttccaaagagattggagataagtgcttccatagcttcaggattttgattgatagactcttccattggttgaggatggattatgtatgtgtttcatgtttggatcataaaaatataagagacagtgaaatcagcattatgcatgtcaccaacagaaagtaaataagagtatcaaatactataacaagtacctacaaatttgcaaaagaacgatccaacttgcaaaaaaggttcttaaattcgaaaaactattgtcgcttgggggaaaacaatgataaccaagaactcatagtccctaaagtcagcaaagctttatttatataagacctttccttgcgccttaaaccactggtttcagcctttgagctttcagaacctgccaggtcaatgaggttctgcagatatatgtgaaagtgaaattatggtccgttgttcatctttaagtgttcagacagtgcaataataaacagtttgtcagagttaatgaaacagtaagctattaccgaacataaaatcacttgataaaaagaaaagatgttatagcagctccactttcattattgtcaaccaatgtattgaccatgggtgtcataagagaaaagttctactaggttgcaaagtgtgtaaagcagagaactaacctaaagaatgcaactataagctaactacagtaaaagtaaaggctttatagggtcaacagaacgacactagctacatgcataatgtgagtttgatttcctgtctgggacctcactcaagcataaaccaatgttaacaatccacagaacaaacatatcaaacaaagtgactatgacattttctttggaatgcagagccttaaggtggtacctttcctgtataatgtaactgtggcttgctatggctatccacatatgtctttggataaagttttgaagacgaggttgttgaaaatacaagggaatcacaaaggctttaacttgcttaatccagcatttgtagactttgatatttgtttagatcttatcacaaaggaaattccaactttcggtgactgaaaaaaaagatgcaagtacaaaactttatcaaataataagagctagcaacaagtatactattgcactttttttgagtttttaagccaatcagaaggctatatttcgtacccactcgcagaaagagcgcgttgagcgagtgagggcgattctgtgggtaaacccctttccaattcatgacttttttaatcgacgcacatctctccaaattctccatcgcgtgactcttttagttattttcaacaaaaccaatgaaaccgaaccgaaatcagttttaatttcaaaaccaatacaaaccaaaccgaatcagcaaatagtgtgaggcaacaattctggacagaaaatttatcaacatctcaacaacggaaaaaagagaaaacaccacaactcaaaatcataaatcatagaaaaatatccaaaaaaatcacagtagcctttgattaaactttcaaattgcaaaatctcagaatcaaagccaagaagaatcctgaagatttctacttccatggcatccaatagaggaagaagaacaatctactgcttcaattaaacatgaaaaacgattcagagagcttagctttactagtttcagtaaaatttctcggcaacaaagtcaaaacagacatgaacacataaaaaaagatactaaaacagaactgtatattcgacaagaacaagaacgaattgcaataattaaacagattagactcaccagtggaaatctaaaagcatgaatctagttgtgagctcttcgtgtttgcccccctttattttctgttctttgtgtgatttcaactcacaacttttatattttactctgctgcttcgagatcaacgcattaaaagtaatggagtacattaagaatatttcgattttaaggggttgaagttgtaattttgaagaagtggaagatcaatcaaaaataatagaagaacagagacgacgaaacctgccggagaactgaggggagaaaaaaacccggcgaaaaagggaaattcgaattcgtcttctgttgatcattgcttcacttctgcttccaggtcttcatcggaaccaatctcactttcactctctaatttctaaattgaaaatcgatcttatcaattgtgtgtttgtgttttattgcagagcttttactcagaagaagctcgctgatctcaaatctctctttttttccctcgcttccaagtctcagagcaatgaccaatacgtctcgtaccctgttttccaggttttgacaaaaaaaaaattgtgttctgttgtcatctggtttttgtggttgataattttgaattaagccttacacgatgtgtgtcggatttcgattttcacaggagtattttggtctgagtggttctttaggagaaaggatctttgatatggttactcaacacaggaaagatgataaaatgacttttgaagatcttgttattgctaaggtatactcaagtctttttatcctcttaatcatttggtttcttcttctgagcttttgaagatcttaaaatgcagagttcaataggattagcagttctaggactcgatatagaatttgagagattcgattgtgttcaactcaattcctgttgctttttaggcaacatacgagaaaggaactgatgatgagattgctgagtttatttaccagactttggatgttaatggcaatggggtcttgagaaggtatccatcttgtggcttcaagttgcttctgttatccaagtttcattacctgttttgttgtatgtccattactggtctcttgatccacttaacatatttggatagaaaatgaattgagattgttagattagatggggttattctctgaatgtgacacattctagtatgtcttcaggtctgatttagagtcgttcctggtggtgattttgaagagtgtgttctccactgagagttctgatgcggaatcaagtgattacaaggagatggtagatgcgctactcgatgccgctactttctcaaaatctgatgatggttctgaaaaaggaatgtcttttgaagacttcagaagctggtgcccactcgttccaactatcagaaagttcctcggcagcttgcttattcccccgggtccaggttgattctttgtcttctctcgtctttaactcatatcttgttgacaaaactggtcaaaattttccttttttcacttttttatatcctctgaaccttgttatatagtgagacctggatatcaagtcccggatctgctatatgaagatagtgtgagttcagataggctactattaaagaaggaatacgcttggcatattggaggagctcttcctcaccacgagcttgtagagtggaagctgttgtatcgcagttccttacacggtcaaagcttcaacacattcctcggacacacatcgtgagtgtttctcaactgtaacataacatcatttaaacttgaccgagtagaatcaagacataaaatataaatatattgccgccccctacaaaaaaaatttctggatccgccactggttgagttcaatgttaaatgtccttaaactgcattcgttaaatgtttaaatttgttactccatacttgagttatctatttacaaccataagggcattgtcatgatagggggatggagggatcgaacatggcctgatggatggactgcagttaccgcagatggaaaacgcagcgctcagtttgagcataccctattggtaactgagactggtgttgaggttttaacagcgaggcttccttcatcgcctgacgtatacccttggcttaccaagtgattaagtgtttggttcctttttggttgtgattcattgggtttgattcttaaacttgggaataatagtgtcatctttttgccattatagaccatttgatgttgttacctcaacaccgccactaactccactaactactagagaaatagactcgtctctctatttctctatcaaaattcacaccggcgattttgagattcttctctgattggtaagatatttctccatcaaaaactttagaatcaaaaatgtagttggtagctaggaagtgaaagcagaaatctactttcgtgaaagaagccaccaacaaaacatctaggtgggcattaccgccacccacatatagaacaatatggctgactaacgtgtccacctatagagagtttccaaatatcaaaataatgttgtgatgttatatagagaaacaaattcttcggaactacttactagctgaagagaatgtggctcataatgagagtaaaaatgagtactttaatgtgtactgtgtacagttaatagctaagaaaagagaacgcaaatttgcacacattcagaaaaggctaccaacaagatacttatattggtgacatactgaccaatcacagaaagaagcagctatatatggcttatatgtgatcggctaattgggcacctttgtaatgctacacacttacaaaaaaaaaccaaacatatagttgatgatccataaccaaaaaatgaagattttaccatgagctctaatttgttccaaagatgatatcctctgttgaacgcatcaacctgcacacacaccaagatctaattcagaatactcatgatcaactagagtgaaaccttttaacttcaagcaaataggtacttgccttgattatatctctggctagcttataaaagttgtcaactacctcttaactctcttctgatctattgaaatctctaaagtaaagggtcgagggtcgagacagcaagcaaagcactcgtgaaacatgatgaatgtagcagctgatcatctaacaatgagattcatatccaatatctcctactgcatcaaattgattctagccatccaccatatctaaaacctaaattaataggtaatcccaaaatttatcaatagtaactgttaagtcgatgaatgctttcaatcatgagtcactttacagtagttttaatatgttagaagaaatcaaccacatgtactaggagaaaacaatgtacctgtaaaaatggactgaacacctcttaacagcagctgatcaagctcagtttctagcttcgtcaactcaacctgattttcatttctgcattgcggcaactgcctccttagatcttggaccagctcgttaagtttctgaaatttactgccacaaatagatattcatatcatcattagataatactatgaagcatatactttggcaatcaaatggtttagtaaagttaactaaaagtgttgaatttcagatcactatgcttgatatgctttttctttctgtgaatgcatcacttaagaggactcgagtttgagatcagctcagagggatgggatgaagtaacatcaactagacttagtttgaaaaaaaaaggtgacgaaataaaaaaaactgatacaaaatgtgtcacaggacaaataaagtattattaagtatccaactatccatctccttcctttagttaatatacaccaaagagttaaagacatgaaaatgaatagaaaacaaaaccttttcatgcacagagtctttgcaatgtggtatatgtggttgctctttatctgaaagaaacagaggacgactagtctcagtttcactctcattttgttcattccactaaaactgacaagtcaacacaatgaaaataaagaacaaacataaaattcacatccactggaggaagaagaacaatttagtgctccaaattaaacatgacaaacgagcttagctttactagatttagtaaaattactcggcaacaaagtaaaaacagagtaggacaaccaaaaaatttataccagaacaaagaagagattagcaatgattaaggtttatacatattttagcactcaccagtccaaatctaaaagcgtgaatctagtttttgcgtaaaattagagaagaagacgaaaagcaaataataacatagctagcaacaactatactattgcactttttttttagtttttaagccaatcagaaggctctatttcgtacccactcgcagaaagagcgcgttgagcgagtgagggcgattctgtgggtaaacccctttccaattcatgccaatttttatcgacgcatatctctccaaattctccatcgcgtgattcttttagttttttttttctttctcaaaaccaattgttaaccgaacgaaattcaattttaatttcaaaaccaaagtaaaccaaaccgaaatcaatttcaatttcaaaaccatgtaaaccaaaccacaattaactgtaatttgcatttctggcccaacgcaaaatgatcacaaactatgaactgacagaaaaatatccaaaaccacagtagtcgttgcacattacaacaagtgtaggaaatgattaaactttcaaattccaaaaatctcagaatcaagagccaagaaactttttaccctgaaggctgaagcctaaacctattcctaagaaatttgtttggtaacatagcttggtttaacctatgcagggggctagaaatgaaataaatctctccatgctttgaaagagataaataaacataccatggtaaacatcattgtatggctccattgctgctgagcaaatcaatacttgtgaatccaatattgtcagtgcacgaaaattcaatcaagatgacttgctgcagtgataaacataagtatgagaaaaaagtagaagattcaagagaatgaaatgaaactactggaatcaacacaaaaaaatcgtaagaaaatttacatgcaagtgcctaccttctccagctgttataagagaaagcgcatgagcaggggatacaataatgagagattcattgcagaattttagagggcaaagcgatacaagtggtcaagttgcttgatgagtgaaaaggtggcaagagagacacaagaagactatctaactaagagttgcttgatgcaggagtcattgtcatgtgagctatcatatccagattgaacaatcaatcagttaaatcgatcataacaattgttttctgctgcctatggtcatgttgtgtgtgtcattaattagaagaagaagctaaaacagatctctgacaacacttacagatacacgtctatgaccactctttgtttatgtaattttattattactatctgaaactgagtcttaaagacagagtcatactgttttaagcctaattttatcaccatgagaacttttttgctaaaaacgtctgaaacagaaatactgacaacaatcgaagtaaaaaaagttttgaggtcgcttggctaggatatatcacaagagactcgctagttgctactgtcatcgaataacgatcgacccaaagatgttgagacgaagaagatattaattccaatttttttgaacaatagatgatactgtatcattgatacatataggcttgcttataacaaagagaaaataaaagttgcacaacaaagtgggaagaagcattaagacagttcctgaaatccttcactcaaggaccttcacaccagaaacataaactcggttttgaatgacactgccaccaatccaaaacccaggcataaccataagaccaactcttgggctctcttctttttcatccacaactactatatgaaaaccacttgtgaaataattataatgtacatgcatttaaatcaagaaacaatacgtacgtgcatttactcaatcgttgaatcgcttgttattataagaaaagattcgttcgtttaaataatttgctaactagaccaaaaagaataaaatgaaactatatatcatcatcactcataaactttggccctctctcatcaggtggagtgtgtagacgtcggacaagctcttttggatctcgttgctttcgatcaaatgctctcaaacataaaaaccctgcacagcaccacacaacattccacagttattttaacttcataattcaacaaaaaatttaatatatatttatgtttgttacctgtccaaaagcaaagttcaatccgtcttgtgtctaaaagtttaaaaatagatgtcactgttgaaccacaatatagtgcacgtttttctagtcccttacacaactccctacgaaagacaatggggtttaagcttgtctcatgatcagcaaaaacctggaaaaataaaccattgtgttctctttaaaaccattaagtaaaaactcagacaaaaaattataagaaaaaatgcttgcctcattggtttggaagtatgttccattaagtggaaaggcccctcgcattgctgttctacatggaatctgatcaattgaatttatgtgagtttcaagtcaccaatgttaaaatatcaaattgtaaattttgtttaccaaaattgttccgcgaaaaatgttggagttttgttctcgtatagtccaacaatatgaacaattctttatcttgcaaagctttgatccatcagaactacactttttctttggtggaacgaacgaggatgatgtttcacctaaaaattattcgaatgaaaaatttagtttatagttatgtgaacaatgataaattatgcttgtattatacctggttgccaaatcgcaagaaggtaaggacttggatcatcaagttttcttctctcaaactatataatatatgtaaaaaaccaaaagcattttctaattaattatacaaaagagttgcatttttttgtagcttaaagtatgtgtatacttacatcgtgtagcagctcatgattatcaggaagcacataactgcaaaaaaaacaagtattagattatatattcccaaaaaatgcatataaattatatggtataatcagtatttacataaagatacttacaccacatgttcagttcttagtcgattataatacttcattttccgaggtggtttgataggaatgcatgcattttcaggagtgggaatcactaatgcttttgatatttcttcatcagaactgctcatcctgccacttattacaagtgcatcttctacacttttcttcaatgcatccaagtcaaaatcaattttaggaacactagcatatgactgataaagattcatgaatggaacatcttcaatgtctgttgactcgggaatttccgctcttggggacgaaggaaactcaactagtggcttataacatatagcttgatcgctacatccagaagaaacacattcttctaccaaatttatatttgatgtcatatctacagcaacgtcttgagaatgtgcattcataaaagtattaggctcatgcatcttttcttctggactctcgagaagaactttagaactattaaaaaaaaacacaatttgtcaattctaacattatatatttatatatataatgtaattattaaaactcaaattcactctcaatatttagaaaatttattatataaaatagctgagacgtttagcaattattttttatgattattctaagatttttctttaatatttatggaattaacaaattaagttatatctaagtatcaaagtaggaaagagaaaaaagattgtacctgacatatgcacttgcaaaatatttgcattctgacttcattggacatgcattacaattaggaatagtttttgtgcagaaaacctaaagttgacaaaatttgattaaaccaacaatattattttattcattaatataaaaaagaaaaaagtaacgcacacctttccaaatgttatcatttgataatgtagttcatatctgtaaaaatatttagaaataaaattaggtaatatgtgttcaaatggcgtaaaaatagttggcttcttaaattgaggaaaaacatttgaacttacaaagtttcttggggaagtttacacaatcgtggccaaaggtacttttgaatcgaatccattgaagggtacctgaaacgagttcatgtttatcgataggagatagttgttagtaacttgtaatgtattttcttaatcaaattaatgagaaaacataactcgaatagttgatgcatttgaactccatttggtaaaggttcaagaggaaccagacctagtcgaactgctatacgaccaacatttgtgtcaacctacacattaacacatgggttttatcagtaaaaattaataatatatgttaaatgaaaaatcataataatattttcataccggaaacgcatgatgtttaagtcctaacagtcgtacgcactcagcacttttcagccctatcccttcgatttccaacagatatctcctgataaaataatagaaagagtttatgatcgcttactaataatgagatctatgagaacataaaaaccaacataaacatacttcactaaatgtgatggagcatttcgaagccattccagatcaatatttccattttggttaacttcatcgttaagaaatttcttgagaaaacaaggaaaaaaaaaaaagtgttagtcttaaatcatttgaataaattattcacaaagttcattagaagttttgtttttcttaccaatattctttctgaaagaatcctgaattgtccacgttttttaatggtggtttccaaaacattttggccagataatctcacgtcactccaattaacagagtccatatgcatttcgggacgagatccttctttcgtgtacatccttctaagattgttccagtcaactatctcatcttctataataccggttttctcgtttttcctttttgcagtattctcatgatcttccacctttgatattgactcatcagataaaatgatacattcagaacttttagcatcttgaggttcctcaatatagtatgatagaccttctcttgcatcaacaggaaattttgcagccacgctcataaacgcgttgctgtagaaactcacaatcaaagtgatcatctattatatgaattagtttttcaaatttcttaacaatttaaacaaagattttaccttgaaagatagtcggtagtattttgtgtcaaaaaaactccaaccactgagtcaacaactgagcctttccactgtttaaactttctattgcctgcaagacaatcatttaaacatcatggaaggaaacataatttcaaaaaatgatcatatacttagcatactcacttatacttggattccttatatatatatgtaagctaatttagaatacaagtataaatagatcataataacaataatgataataacaataatgtaccttgtaagcgatgcatccggttaatgaaaagatctatccgggtttgaaaaatctctctttcttttttccatttggcctccgtctccttatcgtcatatgatcggcttggtgaatcattcaccattaagacatcccactctttaatggtctctggatcaagattaacctttgccgtaacgagtttcttgtcagctttgatcatcgttgttacctttttattgatctttaatcttcccatatctttgattaacttagcaatatccttagttttcttgatgggtcgttctgaaagtacagaactagccgattttattagtgtatctacaaaaaaaaagtacaaacaataaaatatagatataatataacaaaaatatattaaataaatatatcacaatctttttaatcaatatattaaaaaagaacaaaaataagactagattaccttcaatgtgcaaaggaacatctgccagagatgagagaccgtgatctttctgataagttatttgtcgatttaaatgctcaatgacattgttagcacttttcttggtttgctttgagactacatgtctcacgagtgtgtctgcaaaaaataatacacaatgatactttagatataagcataaacaattttgatgtaacagataaattaacaaaaaaaaaactcgattaccatcaatgtgtaaagaagcatctgcttgtccattaatagtcggatgacttactattaaaggcaaagtttcttctagcagttttgaagaagaagcaattctagcccatctgaccatatttttcctacgcttagaccttcttgattgttttttccaaacaggcatcggaagtaaaaaacaaaggaaatcatatctgcgtcgtgtggtggtcctctttttccctcttggaaaaattggtccacaaatcttgtcgaactcaagacaactcagaacaatttcttgcttaaaatttaaagtccgagccacggatctcttaatcttctcgttctttcttctctttggaaagctttcctttgttggagttgcaagctctggtataacttcatcttcactgtctatgtcctttttcctcctcttgttggatatagttctcagtcgagtggtggcgggatttcttggtttctttccgtcttccaagatccgaggcctattaaacctcagtttttttggtgtcccttttgaattccttctccttccttttccggtaacacgttgcgaaatatcatctttcaccataaaataaaatataaatgaatgagtgggtaatgattagtcgattgtgcaaaaatacattatcataaacaatttaaatatatataaactgtaatgaacttacaaataaactgtttttttaatgaatgaattcaaaagtatttaccttgaagatgttctgattcagaatgctttattccatgcttttcttttgaattcttcttctccttttttttatgggtggtttgtgaattatctgttacaataaaagttaaaaataaaataagtgaattaactgattacaaaacaacatggatgatatattacagacaagtatgaatcgaaattctgaaaaaatcctcaatcaataaaatcaaagatgaacataaccacatctgcatcggcagatgaaggacaggttttgaaaatgcttatcaaactcgttaaataaaaagtgacgatggttaaatataaattgtaatgaacttaccaataagctaacttttttaagaatgaatttaaaattatttaccttgaagatgtgctgattcatcacactttctttcatgctcttttgaattctttgtctcgccattttgataagtgtgttgtgaaccatctgtcaacatgaaaaaaaaaaaattgaattaacgaaacaaatcaacacatgcatgatatattgtagacaaatatgaatataagagatctctaatcaatgaacgtgacaacaaaacatcattagtctgctttcccaatctcttatcatcgaatcaaaagtatatttaaaacaaaaaaaaaacttaaatgtcgaaattctgaaaatttcctcaatcaataaaatcaaaaatatgctcattaaaattagcttggaaatctttcaaaacaaaaaatataattagtcaaaaaaccatctcgtatgtcaaacaactaatttctttatgaaattgtcacatactctcattaaaaaaaaaacaagtaaaaggagaattactaaacggaagtaattaaggtattagagattttgtttaccttgatggaaaaattccttctccttactctcttcttcaccacgatctttgatttcatgtggaaaaattaccgaattttgtggaagcttaatagattttcttctcacataaactttttcaaattgttttgttttgatacgtgtctctggaacaaccatgagaagatttttgtctcgatctattgaaaactccattactcttgcagaaagaaaaacaacaacgctagtataatgaattccaaaacatagaaaaaaaaaaaaaacttcaaaagcaatcaaatttgaaaatattttggaaacgatgtcacaccaattaaaacaaagaatttcacaaaaaaaaataaaaagaagaaagaatttgagacaaaattaatccagaaaaactaccaatccaaaccctgctttggaaaaaagagaaactgtaaatacggaagaactcgaactctaaaaacgatgtatatatatttaatattatttaaattattttttccttctttttaatgcttaattaacatatttttcttttcataaatggaagaaaatatcatcttagatatgattaagagatattaacccatattttaaataattaaaataatggtgagttgattacattaacaagaattctaactaattaagaaattgataatttaatttaattattaaccagttttgattatatcaaaacataaatgggcgatgataccaaatctttgtttagattgcgttagatcttttaattagtttaagatttttacaatgatttattatttacatttgcgataattttggcttgtaccttttaaaaaagttataaagtattataagaacattctaaccttacttcaaatttttttatttaaatgttattctatcaaatatgtgaaacttcagttaataaataactaacatacgtttaagaaataattcactaaagtttgtaaaaataatgtaaaatctctaattaattttctggaaaatttctaaattcagtattttgtgtttatttgttgcttataattatgctaactacgagttagatatgggaacccgtatttatagggaatccaacaaaactaatgcaaaaaagtatttttgtttacgattttgctcatcaactaatttttgacgtatttatcacacacaattacatatttttcccttttaactctcaactgaaactacctaactgtgtattatgaattctatctgataaattttcaaagaccggtgacctacatcttcctactttgttcgtttcttactgtctaatatttatttggtaatctaatatcaattgacaaataccaacatcgactttcaacaattgaaggtctatgataactttttctcaatatgttcaactaattttatcgacttacgttgctgtgacacaaataatttctttagatgttgtatcatggagaaaaacaaaagaacgagaccaagaagaaaagtaaggtacatattatttctttgttcagaagaaagcaaaacaaggacaatggagatattacttaacacaaatacataaaaaggtccattttagtggttggtgaaaatgcgattgaaaggtataagaagatggaaagtaatccactgtggacaaactcagagtagggaggagtcaaatcaactgatccgacggcagatagtgattccatcaccaacagggagcatacagatctcgatccgagggtcagcagcaagagccttgttaagctcaagaacaaagtctctgtagtaacgaacgtacttcctcattggtgcatcaggaggagccacgacagaaccattccacagagtgttgtcgtagccaatcactcctccaattttcacaagatcgatcaaacgcttgtggtagttgatgtagttgtctttgtcagcatcaacgaatataaagtcatatgttccatggttcttctcctgcacccaaccacacacaataatcagttaccacactttcttctatgaaaaaggaaacaaatttgcgtatacagaaattctcatcaagatattaaatcaacctaattaggccatgagtttttaattatttcattatcttcatcatcttttttgttaattacgtcagaaagaagaatgcttacgtcagcaacgatttcatcaagaacgggaagagcagggccttccctgaagtcgatcttgtgagcaacgccggctttctcaatgatcggtaaacccaattcgtaattctctctgttgacatccatagccagaatctgatgataaaaaggatgaaactttcaattcccaagttcgacaaaacccaccaaaaaacagaggaggatgaagagattgatttactttgccgtcttcagggagagcaagagcggtggcgagaagagagtagccagtgtaaactccgatctccattgtgttcttggcgttaacgagcttgataagcatgtttaagaactgtccttcatcagctgatgtggtcattatgttccatggatgttttgctgtcacttccctgagttccttcattgattctggttctctaggatacacacttgtctccagtatatactgtgttgatttttttaattgagatttagattgctgaaattgaattgaaaagcagagtttttgagtaaaacaaaaaaacagacctggtagagatcatcgctctgtaagagactcttgtgaccaacttcttgatgtcgaagattctgagactgcttctgatcttctccattggtcgatgatgtcttcgttgcttctgttgttgtcgtcgccatttctctctctttctctctctgtgtttttgtcttcttgggtgagattaaacgattgtgtttttcttggtgagtcacacacatggcatgaggtctatataaagaagatggaagataatgagaccggttcgtaccggttctgttatatccggtaaaaaccggtccggggttggtgaaactctcctaacacgcaattggtcggtcgctgtcttatagtgggtcccgttacactgtatgggaccttaatcgcacttggcgtagtaatgcctcggcggggcaatcaaattgagaccaaactcagggaagtggttatgtgaaaattgaaaacaagtgaatacgttttttcatttatgggtctgtagtaactgtttgctgccaaattttgtgagtatgatgtgtttatgtctagatttaatgatgggaatatgtatttaaacctctggatatttttctgaaattagacgattacgaaaggggtgtgacgtaacgagaaattacactggatatgtatgtagttggcgtatattaaataatttaaatgtatataataaagagaaaaaaaagtggagacttggtgagtagagattagagaagggaataaaaagtggattcaacaactctgcttcggtgttgaagtgtaccgtggtaggtgaatctcttggtaggcgacttccttactaatcatccttaatttcttttatttattaaaaaacaaaataaaagagaaagaaaaatagtattggtatgaaaaaattaatgaatattgcaatagcggaaccttcgaattgatataacatttgccataacataacacactagtttggtatatatatatatatactaatttatctacttcacataaaaaataaaatttggagaaaatgagaattaaacgtttcatgtcaggatctttcgtttgccctttagatcatattgatacattgtgtggtaacaaggcttgtctagtgaaagaaatgtgatattttccgaacaaatttttttaaaattatattaaatggcgttgacctatatttgaaaaaaatatatatgcatatggttatttacatgtataggagtatagagtataatgtatttgaaaagctattttactttgatggaatgaaaggccaataaataaatgttgtgtgaagaagccatccaatttgcataaacatttaaacattttaaatggtgattataaattaaaaacagtgtcccatatgatattctatggagttgaacacttaatatgtgcgtgggatgggccgtctatattatcaacggaccctaacataattcgaatgactttgtgtttacacaatgacgaacaaaaccaattcagccgtactatatattaataaatggctcgtttttgttcgagaaagtggaacaaatggttgccttttaaaaatcctttgaccctaatgtcggaagttcgaagtatacacttgaaccatcccatctttaatttcccactctttttagttgggccatagcccatttcataggtttcatcgaaatttatttttctatttgtcaatgttgtcaagttgtcacaaagaaaaaaactttgtaacggacaacaacttagacaaaaatttttttaagtattttagacaaatctaaacctaccgctatgaagtgcgtaatgcgaatggttgagtatgtttctagcttatttaattgagagagaggacacgtttatagtttctattagctagatggattaataggaagggcttgagaggggtctctgttttggactttaatagcccaaaaacagaatacaagtcaagccatatgggtccactaaaactgcatgagagctacgtgtacacaactgttacacaataatattataccatttcacgtctcaattaactttctattataaacaattactttatatagtaatcaaacgtctttaagtttttaaacggtccatttttcacatttattacaaacaccaaaaaaaaaagtgaaaaaaatctaacgtaggagaagaaaattggtaaagcaccatcaagcaacgtcatgaataaataaataaaaactctttacaataaattatgtctgcctgtttcaatttaccaaacttcttttgattaaaatctttggaaccaaattaaattttaattacacgaaaatgtgtttgtaagaaaagatagtatcattcatcacatgtaatctctacgcctcttaatcctctcttccctcatccactgcttctttttttaataacccatttcatctctttccccttttacgctcttttctttcttcattttctgtggaaattttcagagcttttctgtgtaaattaaagagttcttttttgaaggaaataggcaatctcatcctgagaatcaaacaaccggaaaattcaataaatgaaacgcctttaattgttttttcttacaaaacttctaagcagattactttggcggagacccatctgattggtatttttgcaggtacacagtttcttcaattctctgtctttgttttgtttactttctctaccgctcgacgatcggtcttgaatctatttcatttactggatcgtttttttttatgtggaaatggtttttgttttaatgtgttgattcaattgcaatagctgtgaatctaaaggatcgggattctctaaccttagggtttctttctttatgattggagcctctttagtgcttaactgttttttgtttgtgatgaatcggaatgtataaagatgcaatcttgtaattcgctttagttatctgtagctacattctctcttttctctatttccgacaagattttgagataatgttgcaaggactttgatttttctttccgtatatttcagtgagtcccctaatgaagtttactgagttaagcagaagtgttggtttcttagttaactgctaaagtcatggttttgcaaatgtttctgttgtttgcttactaatggagttcttccagatgaagtttttagtgtgttttagcagtttctcttatatgaaattgatacttgtgaaatatgatggatgttttgaaactaatggtttactcgctgacgtttcagatattccgttcttggagtaccaactggcctggagctacattccttagcctggagtaaataataggctgaccctttgaaatcaacatggtaaaccgggaatatgtttctcagtcctgtgttatatctttccaaactctcatcaatggattgtttgttcaatttttgtgtctccttctttttgtctggctttaggtttcctcaagaacttaataacttttcgctggtttctgtcctggagcgttgttgtgtgtttggtcagaggtattaataagtccaatgcaaggtccacgaagcactggtgattcatcgactggaataaattatgcagatggagaacccatctgtagcaccaattcagagactacttccaataacatcctgaatccagtggatgttcagtttccaaacaatactacaggttcaggacgaccaacttacgcaagctctagctcgcatgttgttcaaaatcataactggtggagttttggtgaatccagctctagattggggccttctgatcatttaaattccaatggttcaaagactgatcgacagcttctctcagatggctatggatttgaggaagggcaatcaggtatgttgttacctggagagtcctttttgcgtgggtcaagctctagtcatatgttaagtcatgtaaatctgggcaaggacatggacattggtagtggtctgcagacttctggggtcgttatccgccataataactgcgagacttcattgggaagctcaagtcaaaccgcagaggagagaagcagtggtccaggttcttcgttgggtggtctaggttcatcctgcaaaagaaaggctcttgaaggagctcctagccattctttccctggtgaaagtcatggttgcttttttcaaactgagaatggtgcttggaatgagggtcttgctcaatatgatgcttcaagtagcttaagtttgtctatgccctcacaaaattctccaaatgttaataatcagtctggtctaccagaaccaagatttggattgggtggtgggagagcagttacagcaagtgcttttccttctacaagaagcacggaaaccatctctagacctggcaggcggttaaatcctgggcagccaccagagtcagttgcattcagcttcacacagtccggtagttctgtgcgtcagcaacagcagttaccagcaacttctccttttgttgaccctctggatgcaagagcaataccagttacaggtagctcaagcagtggtgatggtcagccaagtatgatccaccttcctgcattgacaagaaatatacaccaatttgcttggagtgcttcgtctagttcgagagcaaacagtatgcctgaagagggattgtcaccatgggacgcgccaagaataaactcagagcagccagtctttactacacctgcaaatgaaacgagaaatccagtgcaggatcagttttgttggagtttcactcgtggaaaccctagtacatctggagattctccctttgttcctcgagcaggatcgagttcagggatccatggtttgcagccgaatcccacttgggttactccccataatcaatcaagaatatcagaagttgctccgtggtctttatttcctagtatcgaatctgaatctgctactcatggtgcttctcttccattactacccacagggccttctgtttcctcgaatgaagctgcagcgccgtctggatctagtagtcgtagtcatcgctctcgacaaagaagatcgggattattactggaaaggcaaaatgatcatctccatttgcgtcacttaggaagaagcttagctgctgataatgatggaaggaaccggctgatttccgaggtctgtatgaactctttagcagttttagctgatgtggcatctgtctcagtggaagtcaattatttgttgatggtatttgctgatactagtaatgtcagtcactcagttggtactctcttgtttattggcagatacggcaggtgttgagtgccatgcgaagaggggagaatttacggtttgaggtatgattttgtcacataactgatttcaatcattccctcttaattacagttaacaggtaaaatcacatcgcactttttgccttcaagtgttagttttagatcttcagaatgttggtatactatatgtgatctctgtcgacatctaagttgtgtaccatctttttagctgtatcgtatctactgctgctaatataattggtctcacattgtagtaaacgtagtgagaagcagcaattctctatcaacatatcttattggcatttgtataaacaaaacgtagtgcaagttcatccccaatagcattttatttttggatcatgatttttcatttggtgatctgataggattatatggtattcgatccactgatctaccaaggtatggccgagatgcatgataggcatcgggatatgcgtcttgatgttgataacatgtcatatgaggtgagtgttcatttttcttttaccattttatctctatgtaccaatttttttaaacatggttcgtttgggaatgtaggagctattggcacttggggaacgcataggagatgtgagcactggtctaagcgaagaggtgatcctgaaagtaatgaaacagcacaaacatacatcatccgctgctggctctcaccaggacatggagccttgctgtgtctgtcaggtaagacatgaaattactcttacaccaaggtcttttatgcggctccttggacctgtttatttgtctcttatggctgtttgtttgcaacaaattcacttctttaccgtagtagatgtggtcaagccaaaacaggagtaatgtattatcacgtagatagaaacctgccacaatttatcacattttatcttgacattacactaaaccgtccatgtgtgtaacatgggttggttaggttcatctatattcccatttttgagctgatactcagctttaactcggaagctgatgtgaaaaccttgatgcatttttaacaggaagagtatgcagaaggagatgatcttggaacactgggatgtggtcatgaatttcacactgcctgcgtcaagcaatggctgatgctcaagaatctctgcccaatttgtaagactgtggctttatcgacataaaagcaccgttccttcatcctcgtcctctttccctatctcctcccaacctattgtgatccttgaaatgaaagaaaaaaggagaaaaagagatcgcgtaagaggtcgcttctgtcttacccgcattgatatcaagagagagttgaaacaaggaagggcctgtgatgaatgatcgatccttgtgtggaagcatcatgttgaattacataggagaagagaataataactatcaattgactcaatcttttgaattgttggattatgatgataagtcattgtttattgtcagtcaactcaaatctgaggtaccaattctgtatttgagagtgtcattgctctttagctttaatatttttcaggtaatttttgttgattcgttatcgtttgattgttgcggtaaatgaattctattgtgaaaaagggaaaaaatgtatttggaagagacacgctcggtggggatcgaacccacaatcgtctgattagaagtcagacgccttatccattgggccacgagcgcctttttgttgttcgttatcaatcaaattaattagtaaataaattaagtttcgaaccagtcaacgatctgttgtagttggccatatttctcctccattgacaatcaaccagttttggtagctcatatacaaaagtttatacatttatttgaaaatgtttattggttaaaagttgtttacattctaaagacaccaaatcgagtatcttctaaaggacggtttaaagcagcagagagacaaagtcccaaaacctttctggtatcacaaggatcaatcactccatcatcccaaagtctcgccgtcgagtagtaaggatttgcctctctctcatacgcatccaccgttttcttcttgaacgcttcttcctcttcctcagtccactgcatcacaaagaaaaacgcaaattcatcaatgttgaacaaacagagttgaaatcggtttagagaatgttttattcagtaccttgattccttgtctcttcttggtagccctttcaatctgagttaaaacacctgcagcctgcaaagttttcgccaagccaataacaacgtcaaacaaaaccaaactgaattttgttctgctacactaagattataaacacattttgattcagtttggtttcggtttaaacatttcggtgcattctggtttacctgagcgcctcccatgatgccaattctggcgtttggccaaatgaacataaaatctggactgtatgcacgcccacacattgcatagtttccagcaccaaagcttgcacccgttatgattgtaatctttggtacctgaatgaagacccgagcttagaatctggcttatcctaatcaaatctctcagactcttaaccaagaattaaacataccttagcacaggatactgccatcaccattttcgctccagcttttgcaatgccgttggcctcagctctagaacccacctataagcaaaaacggagcaagtaagatagatagagacactcttatatagccaaatgtgagaacacaacacaaacactacaattaccataaagcctgtgatgttttggaggaaaacaagaggaattttacgttgagaacataattcgatgaagtgagctccttttagtgcagattcattgaacagtatgccattgttcccgataatacccaccgtctgaccataaattctagcaaaaccagtcacaagcgtctgccaaaaagaagttccacataagaaagtaaaaaggtaacatttggatacaaaataaggcgaataacattatctcacagtgccgtattgtttcttgaactcgtcaaattcacttccatcaacaatccgggcaataatagaccgcacatcaaattgctgtttgtgatctactggagcaatggagcgaagctcgtttatgtcatagagcggttccttgtatacaagatttttgcttccaaatgttccttccatcccttgttttgcagccatgtgcaaattcttgacaatgtttcttccaatagcgaggccatgtagctcgtctgcaagcttagagcatcttaaggtctaaactctaaaacacgattattgttttcatattaaattgcagaaagagatgaatatatgtaccttgagcaaaataatctgacacaccggacacagtacagtgaacagtggcgcctcctaaatcctcagctgaaacttcttctcctgtagcagcctgttcaaaagctttttcatttagcgttagattctcaagaaactacttaagactagaacgagagagagagagagagaaagtaacttgagaaaattgaccttgacaagtggcggtcctgctaaaaatatggtaccattccctttgaccattacactttcatcagccatggcaggaatgtaggcaccaccagcagtgcaggagcctaaaacaatggcgatttgtggaattccatcagatgacataaccgattcgttgtagaaaaccctaccaaaattctccttgtcagggaaaacctcagcctgttttggaaggtaagcaccaccactatcaacaagatatatgcaaggaagtctgcaccgagcagcaatctcttgtgctctgagatgtttcttgatagtaatgggataatacgtccctcctttaactgtaggatcatttgccataaacatacaaatacgtccatggattggtcctatccctgtgattatcccacctgaaggcaaaggctcctcatacaattcatgtcctgcaagctgcaaacatattcatatccagtaagcagcaacatcaaacaagtttttaatcaatgccaattccctaatcttcttttgttttcctaacttatgcaagtactaatcaacaataaactctagattgcaaatgtgcattaaatccaaacaaagaaacaaaacaaaacctgagagagctccaaaaaggaagaaccaggatcaagtagccgatcaatcctttctctaggcaaaagcttgtttctgcttctgttcctcttaaccgcttcctctccacctccggccaatacctacaaatctccaccgagatacacttatatcattcatctgcaaacaattaagacatcaatcgataaatgagatggctttacctttttgatatgggaacgaagctccgataagatcccttccatggcgatcgaattgctagaaaaagcctccgaatttctgtcgactccgtccggtaaaatgcccacgcagaaacccttttgtagtccccggaaagttcgaaaaggatcgggacgagaatcggttcctggtcggatccgccattgttgaatactagtaagctctttcgaagctgaaacaactcttctccccaaaatccttaacattttcgtctcactgtctctcgaaaccgatttcacttaaaagacatatttatacacactgttgtgactgactacttgattgtctgtaattcatatctcaaaccaaagagaaaagaggagataagctcaaggaaacaaaaatactatttttataaatcgttttcaaaattcgtctcatttctttagagaatcgtgtgtgacaatctcacagtggaaagcaaaaaaaatgttacattttcgacaaaaattggaggaaaaaattgaagctttatccaatcaagcaataagacaacgatacgacgacgtttttagctttcttcaagaagtgtatactagtagataagacgcaactcactctccgtctagcggcgggattatcagactgctgcattagctatcgtcaatggggtctttaggatattcgatttcaatgatagcttcgctgagtccaactttgatggagtcaaggcttatctcttcgatgggttgtgtctcgatgactgttgctcctagtttttcttcagtctctgtagtttcttcttcactagggacaacaaggagggaccgaactttaaagcttagatcttccatgtctccgggtatggtaacaacgctagattccgatgttggcgtcgggtcttctgcaactactaaaaaggtttctccttttttcttgttatctataactaaaattgtccagcttgtttgtgtagagagattgagattggagataactgagaaactatgtaggtgcttgttccaattggatatgggacggaggaaatagaagctgttgtgttagttgatgttttacggcgagctggtgctgatgttactgttgcttctgtggagcagaagctagaggttgaaggatcctcagggaccagattgcttgctgatgttcttatctcgaaatgtgctgatcaagtttatgatttagttgctttgccggtaagttcctcttttgctgattcataaactataagtgaggacagtctttgagctttactttaatggttttgtgtatttgtttctggatggtctggaaatacaaattgtgaagggaggcatgcctggtgctgttaggttaagagactgtgaaattctcgagaagatcatgaagagacaagctgaagataagcggttatacggggctatatccatggctccagctattactcttcttccatggggacttttgacaagaaagagggtataaatcaaaatctttgatgtcatctagtaactaatcttttctcttcatgttttgatttctaaacttggtgtagttcatcgtgcaagacaacgggacatcctgcttttttcgggaagcttcctacattctgggctgttaagacaaacattcagatttcaggggagcttacaactagccgtggacccggcacttctttccagtttgctctttccttggcggagcagctcttcggagaaaccacagccaagtcaattgaagagtttctggtctatatcctattcacttatacttttctggatcatgcttttctttatccttctcgatatgcaacaatcttctcatagtcttcttttccaatcatttctccagcttctgcgtgatggttaccagaatcctaagaacaaagagttcaatagcattgactggtctttagaccacacacctcgtgtaagtcgcatgaagctatgatcaatgcatttccatgtaatctcatgatatatgatgagaactgatcttggttttatcttctatacctatggagttttttcttttatccattccttctcctttcacgctcagttagttttgaaagatgaaaaagttagctgattctaagaacatttcattttagtttgaaagctgagaaacttgttttaatgatgcatctaaatccaggttcttatcccggtagccaacgggtctgaagcggttgaactggtctcaattgcagatgttcttagaagagccaaagtagatgtcacggtttcatcagttgaacgatctttgcggattacggcattccaaggcaccaaaattatcactgacaaattgattggtgaagctgctgagtcatcatatgatctaatcattcttccggtaaggctttaagcaaaaccctgcatgtcctagtctcataataaactcataccatttcgctagtttacttcttcttaaataaatcttgctatgtacatgtttcagtataacttatatgccatgtcaaatcaatgcgcttaggaaaagcttttagacaaactacaactgttggttgttccatggtgagtaatatgatttcttttctttgatggaaattcccaagggaggccatactggctcagaacgtctgcagaagtccaaaattctcaagaaactgctcagggaacaacatgaatctgggcgaatatatggagctaccaactcttcatctaccgttttgcataaacatggtttactcaaggtaaggtgaagacaactattgttcttttctttgtcatatacatggacaaacgccataaacaattggaatcctattttaggagaagagaacgactgtgtatccttcagagtcagacgagcctatgaatcaacaaatgatcgaaggagccgaagttgttatagatggaaacgtgattacaagtttggggctcgcaactgttaccaaattttccctggctattgttagcaagctgttcggacatgctagagcaaggagtgtttcagaagggcttgtgcatgagtatccaaggcagtaaccgtttgaaagcatcttgttcaagaaacacagttagaagatgtctcattactgatcttaaaccgaagtataacggtccgatggtatcaaaccacctcaactccagagacttttcacaagtatcatctgttcaacgttgatgcaccttatcctgaagcgggatgctatctgcaagaattttgccaatttagtatgtgtatctaattttgtacgcccagttggattaccagatgttgatgctaaacttgatgtttactctcttctataataaaggtgttgacttgggcccaaatgagctaaagaaaaaattgcagacaagatacaagataaattcactctggttaagtcacaaagatgttcaagacaaatgataaagatccattacatcaggaagataaaaccaaaagatttaggaaaatagaacagatatgtgtttatctatctctgtcaaatccgccacacttcaagatttacaatcacccacagaacctgcctaaactacgtacaaagctagctttctatcttctgagttgttctataacttcggcgctttgttgggttccttagacgccattataagctctaccagggacccgtcaatgtccttcgcaagcattgccttttgcatcccattccccatggctggcgcagaggctccagaagctgcaacaacaaatgagccaacttccgttaaatccatgctcgtcagattagtctcatgaaatatccaaattggcattgcaacatattcacaaatcttaaatactttatgcagagtgggaaatcaaaaatgtgatgatatgtctcacttcatggtatagcttacactattctactcaaaagcttagaatactgtccaaaagtgtaattcattatgagtgagagttaaaagcctagccaacaaccatagaggatattcaaatcaagacagtacctgatttttctgcttttccatgatttcaacctgcatgaaacatttggtcagtgaatacaacctcaagaaaatatgaaaatctcgagattcttaattgtgatagggaagaagcgagacacacttgtttcttctgcaactcttcattcaattctttgagttgcgcaatttctgcttccagttccatcgtataagcctgtcaagcaagaaagtgaaaaagtaaataacatggtcacagttttaaggtttctttaatctccaaaatttaaacaaacactcacttgcttgcgagcgcgggatcttgcagctgattccctattctttatcatccttttttgccttctctcaatcactttctccagaactgcacctgtttttctcactcgcccaaacatgtaaggaacaggggacaaagatgcatccagggcgctctttggagtcagatcaggtgacatctggcttccaggagatactgctgcaaccgttactcctgttttaaaatcgacagcttgcagtagattgttgttcataggatggttatgaattccaagtattgaaggcttcacttcctggcactgcgaaaaaagtaaaaacaagtcatgctcagataactgaaacatacatgcatatccaaaaccagcttatcttaaaacatgaaggctacgtctaatatttttcagatgattgtatttcctacaaaatgtagtagcttaggttctttagtcacctgtgttgcaggttgagaacggttaaccacatcaacagtgttggaaaatgctatagtggtctgtttgggaaaaggcctctcctgcgtctgtatcagttgttgcggctgctgcaccatctgtggctgctgcaccatctgtggctgctgcatctgtagtggctgagtttgagcagtcagcagatcctgtctcaccgctactccatttcctgacaaatcttgaggttggtttgcaacaaacccattactagctgtcccaagacctccattactgccaaatccatagaatccgccattgaagttagttacactctccaccggttgaggttcttccctaaccacaccagccctgaccaaaaactcctccaaagtcatctctcccagcgtttgttgcctctgcggaattc

SEQ ID NO: 666 - DNA, 114367 bp, Arabidopsis thaliana
gaattcggtgtgtttatcgctgtctccatcctcttcgttcatatatgtacaatatatttaacaaattttaaattacagatttattttatgatacaacataaataacttaaatgtttaatagttttttttttatagtgccataaatcttgagtttgaatatgatccagagtttcaaaattatgtgtctcatttaaaactaaaagaactccaaaaacacatctccatagatttctacaagctataacaaacagatctccatagatttctacaagctactttcattaatttgccacatgcaatcatcaaaagattaaagtaagccttcaaattgcttatgtgtttacccatataaaagaatatacgccgtgttaagagtttcttagaagaagtcatgacttgaattattctctttgttgacgatttgatcgaagcaaaccaaaagtacatatatatcataaactaattatacttttacaattgagtactgcacatacgttttttactagtcaagggatgttgacaaattcacatgcattgaaaatcaggacatgattagcttcaaaacaaaggaagtataaaaagaagtaaaaaaaacaaaaacaaagagctgcattctcaaaatttgtatagtccatgattatgtctcacagctgcaaagtctatatggtggttcataaaaccaagtaatcattggtccaatgcagtaaataaaacaaaaaagatattcatatgtgggaaattataacaaataaacaaggaaatatatactgtattttaatatcatatgatcacatatatatatatatatatactttttgaagtgtctcacagtcaatatgggattagaactcaggttttgatgttatatctttcaacgtgggttggtaatttctttccggaaaatggatgacatcccgagacactatttagaatctatggtttagactttttagataaagattatttcaactatagttgataaactacgtactgaccatatttcaacagctacgatcggatagtcaacaattatcttaaatgaaataccacaatttattcaatgcaatgtatactgacacgcccatttgttagtttctattttatcagaaaattttataatataccatttaaattatttttattgaaattaatgataaaaataatttaattaataaacaattattgaggaaaaggttcttctaaggatgagcgagtggcgaatcagactccttcctactttaatgaatttttgtaataacttttttttttactgcaaatttttgtattgattaaaaaattatgttatcggcttcatatcgatgtattccgaatatttaaggcaaagatggaaaaaggtgtaagcaattcattagcttttagttccaagccatatacaaactaaaaccaaactgaactattgagcttttttatatttctgactcggtccaaattctacatttttttttttttgtttaggcagaggtcaaattctgcatagaaatttagaaaactacataaaccaatgaatatgttagaatatatgtaaattaaacatgcaacataagacataaatgggatgcatccaaagatctcttctaatgattagtaattaattgagcaattatggcaataatgatagaaaaatgaaaatgaaaactataagggttataaatgaagtaggtccaaaaatgaaatataatattaatggaaaataacagaaaaaaagaagaagaaagggtatagtgtgagctgcaattgcagaacctgtcgctatggccctctccttaagacaaatcagactgcaggtcccaaacccttgttctatttcgtgattcacattattgtatgcttttatctccacacttctccgttctcatatatacatgcatattttatgtctattttatatgactatagcctgtacatgttatcttaaatatccgtacgtataaatataatatatgcatagcaatttgagccttttagaccattttcaatcaatataccacacccaaatgaatgtaacatttagttgattattctattaacagcctcttagataacgaagatacctgaaattttgtctaaatgatgatgtcgaaaatatgaagattcatgatgttgtgtctcaaagtcaaatattcgtatatgaggcttttaacaatactatgataaaaaaaaaaaaattgattctgttaagtgaattcacatatttatgataaatatattgttggcaattaaaagttacagaaaatacataaatgttgttaaatacattgggtgaacaaataaaacgaggttaattatgtatagaagacatgatgagtaatgtgtttttttttcccggcgtacatgagagtaatggtaattagtaagattaaaaaatgctcactacaaaaaataaaaagataaaaatgttattgaattatatatacttgttctttatcaaaaagagtatatgtttaatgaaagattttcttataaacagaccgaaccccagtattgcaactggtatccaatgtggaatttgtgtatccatataattcaatagtggtcacaatttcatatatgaagccaaatctatagtctcacggtttcacaaagaaacatcaagaaacatacaaaatgtcctcaaacattttctccttttttgcatcatttatcgattggagctacagaaacagtttctttttgaaattagaatatttcgatagtagccactctacgataagtcgataagttattttaacatccagtactccatgcatacgttatacgcgcacagtgtagtgaattagtgatatatgtacaatgaaagaagcatatatatgttaagaaataccacttttgttattatttggtttctacgttctgtccatgtccactagaaatgacatcaagagagattatcagtttttaattttttgggaaataagaaactactgtaaattaaattgaatatatataaatgatatgaataattgtaagattattttcggatttttgaagtttaatatctataaaagtaaataaagaagtttaatatctatgttatattgggatttcgattttcatgttgtcgtattggagtaaggtaatcatcatatatatggtacaacaattagagaagaaaggtgaaactcacgagatatgtattacatgttgtccaaattcgtgggcaaacgattcactctgaaatcgtggtcacacaaaataattatgactcgatcagaatatattttttttttggtacgctcaaatttttcatatactttttttttcttggtagatgaacaaaaaaaactaaaaataagacatatatgtaggtataatgcatattatggagttgacggttggatcgtacgtacgtattacttgaacaagtaaatgtcgggattttgacagaggaagcgaatgagcaaaactatgccaacatattaaataaagtcagagcttcgtttcattttttatcctcatgagttgtaagattcatttcaacttatttttttacctaccattactactcttgtacttttgatatttattgaattttatctgttcattttttattttattacctttatttttgttaattttattacctataaacaaaaaataaagtataattttctaattagtattataaaaagacttatagtattacgtacattcaactcgttgatacatttaaatttaaagatatatatgaatcttacatgttcttgcatatttttcttccatgtaaaagccatatatatctcaaactacaatacaaaataaaaattgtgggaattatctacaaacatttggttagacaagtgacaatagataaaaaaactgttgtataaaaaaggaaagaattttgagttaatctgaaactttttaatttctgaatttttactgttgacaaattttaattctaagttgccttttgagagataactatctattaaataataaattaattgatttatgttcctatgtatatggttcgtatggcaactaatccacctttgtgagcacagattagagtgctcgaaacgaaattgagtgtctgtctaaatgattgtagctccttctgtttttggaatgttccagaaacaattaatatatcttttggacagttaaatgttagatggttatattcaatccgactggtccagctagaatcaaagacaacacatatatgcagggtttaatcaaagcttgcatctacgaaaatagaaacaacatcgagtcaaaacttgcatgtacccatataaacttgtcaaagtaattgagtcgatagaagtatttgggagggtcagtaattgtttctagcaaggtgtgggtaagaaattaattgcaataagaaattcgaggtcaaagagttgacaaaacaaaacaaaaagtaaaataaaacctgaatgaagcaaagggattggtttttcaactattaccatatttaaagttttattatgacatactaacataaatgtgttgattctgaatgaagtaatgaagagggtttggatgatgtctcatcagtcaccactgcaaaaggatgtcctgtaatttgtttagacaaagattttgtgggtatcttctctctctactacttttaagattgacctatcttctctatgtatatttacttttaccttatttacattatagaaaaatagataaataaatctcttttttgtttggtatgtgaaatagaggcattcgctcgcatgtcctggttaaaagcccctcataaccttaaatttctcttgaaaacccaacgaaaattttattcaacgctcgaactcacttggcaggctttaaagccaagcccattcagacagtggcatcaagtgagccaatagctagctacaaatcctaagagaatggtttaaggaatagagacacctagcttactataatttgtcgttgtcaacaaaaacaatatatatactttcttaaacccataaatatgctgatgataaaattaaggaaaatatcttagttaaagaatattcatatgttttacaaattcacgatattcaggaaattaaggaaaatatcctagttaaagaatatccatttgttttacaaattcacgatatttaggaaataacacgttgagaatcctaataaaattatgactgagataattccctgtagaaagattttaggcgagaaatttggagacagaaaaaaagcttacttaaggaaaaagaaagagcttcttacttgataagcaaccttgaccactcaaagggaaaaggtgatcggcaaccatggatgatggagaagagctaccggttaaaacaatgctgatgcttcatgatgatttaatattaaactgcttagcgcgcgtctcaagatcaaaccatccaactctctcattagtatgtaagagatttcactctctccttgcttcagtagagctttaccaaacccgaaccctcttaggccgcaccgagaggtgtttctacgtgtgcttacgactccgtactgattctaaacaactacattggttcattcttggccagagacaatatagttccagaaagattttggtccaaattttatctcccaattctacctctgcgggtattgcagtggttggtcctaatatcgatgccattggcggaggaataaagagtaatactttgtctagcgttatggtcatggactctcgttctcacacgtggcgtgaagctccaagcatgcgggtgccccgcatgttcccatcagtttgcacccttgatgggaaaatatatgtaatgggaggctgtgataatctagattcaacgaattggatggaggtttttgatacgaaaactcaaacttgggagtttttacagatccctagcgaggagatatttggaggctctgcgtacgaaagcgtaaggtatgaaggaaccgtctatgtttggtctgagaaaaaggatgtgacttacaagctacatgaaggtagatggagtgcagcagacatgtcggcgaatggttggggttggccaggatcttcttattgtgtgatagagaatgtgttatacagttgttttgtccacaaaatccgttggtatgaccccaaagaaagagtatggacacctttaaaaggactgccttccttgccttgtaatggccacgttaaattggcggattatggtgaaaaaatggtgattttgtgggagaagtatgtggatgttgatgagaaaaaaatgatttggtgatgcggaaattgcgataaaaaaacgccaaaatggagaaatttggggaacggtagagtggtttgacaatgtgtttatgtccaatgggccaaacgctttaatgggtttagtgcatgcgcttactagtacggtttggtgacatgaacgtgtgaactgaatcaaagtcacccaaatttagttttattttgatttttcctttttgatattcttgtcgaacccgagaccttggagaattgtttggttatgatttttcttttgcaattcgtttggcaacatctaacaatctaattttagtggtaagcagagctggttcacttctattatcattcaactgatgaaccacgagaacgctctcttgtgcattcagaggcttctccttggtgctaagtacgctagctttttgcaagctagatgggacttgcatgtctctttcaatataatggaatacaaccaaaacacacagattgtgtttcctttttcccctgtccaaaaagaaaacgtgcttcaactcctgcatgcttcttttctttcgattctacaaattccaagaccatctgtttattgcttgttctggagaatctgctattgcctattgtatgtttaaataatttctgggttgtttttttgtacttacttattcaataaagagagcttgaggaagaatgctattgttgcaagacagaaacttttgggccagcagttactttgttgtgtgaagtgagagtttcagataatatggagatgagattacctttgatttacttttggtcgcacgtctaatcagattcatgcattcactgcaagtggttatattattcgtttgtttcagtctaggtttattatcatgtccttcagaattacaaatatactgtcatacataatacattcacacgtttataaaggtatgcttccttttacaactgaatcatcacatctgcttcatgggttctgagatcttgtaaagtaagaagcatattattcattatcagtttggtatactgaacaacttacacagaagaagaagaagaagaactgaatcacttgatgagaatgcatcttgtcggtgctccttccgctccaactaatctcagcggtaagcaatgaagcgagtatgttcctacctccacaccatccagcttcagcgcttccactgggattatatcctgaaaacatgtgtatctcacgtgttaagacgtagttcatctcccttttaagcctacctatctctctcactttcttgtccagtgaataccgctatattcaatcatatcccatggtttgacatccaaacatcacaggagaattggaaatgtttaggtacttgaatatttttttatagagaaagatatactaacccgtcctttaagtataaccctgtgtgttgcaggtgattcctcaaaagcagcaaatgaaagataatcaagccctggattccacaatgcagaataaccggtttcagaaaaaaatgtgtaatacaagctatcgatcatgaaaagctaagaaaccgaaattgtccatctcttaccaataagtttgatgtctgtattctcaaccaaccatttagccccatcggtcatgaacccagcaaagcttgaatcaaactctttcttaaacataagccgcctaatatatatatcaaacacagagtgagtaagcttatgctctctagttgtttttaccaagattaaggtaataacacacactctcaatactgagactcttacttgtcggtgttggatgttctaaagagcacacgacgaactcctctttgtatatgaagtgattccattacctcagctaataaataataatccaacccaaacacaaatcattagacaaaagatactaactttaaattttcgttacaaattcaacaactcaccagtaatgttcttatctctcggaacatcaaccaacaaagcaggacctatatacacaaaaaccccaatttcaaaactttatcactaacccaactaaaatcaataaacaccagattcaaaaattaccatttaggacttggagatcaagcgaatcagtatcaaaaccagcatcgtaataattatcccaaaagtgacctggagcatccacgtgagttccagagtgaacagatagtttcatctccgatacgttagcgaatgatccattcttcatactcgcggctaatcgcaggaacgtctttcccaatccttccgaagattcccaagctggaatctccggcgtgtaacgatggctgatgtcgtatatcttacctccttcgtagacctcacggcggattggtttgggatcgtcggcgaggagagaagaagagagggagagtacaacggcgaagaggaagagagggaaactgacggaccgggtcattgtttcgggtcgccggttaacgggttcaattttttatactagtgtttagtaatcaaatgattaagctatggtttatataatggactcctttgacctttgacttttgacttttgagtttggcaaaaccgtctatattgactaaaaatagctgaaatgatttttattaaaacaatctgaatatcatcgaggataaaatagctgtccacatttcacaagcttcatcaaaatattgacgtcacgtttcttgattctcttaatcaaagtgttgatgtcacgtttttaacttgatgatagaaagggacaaattaagaatcggtttaatcacaaaatgttgatgtcacgtttcttgcagaacgtataaaaatattcatagcttgatgttactatagaagctttatgatttgctttatagttaatatatactccattgttggccaattggtggagagattgtaaatttgtaataatgggggaattgagttagtggtggtggatactggacaggcctagcccaacatacagggacggggttattataccttttgccttccaaaattgtttttgttttagacagcccatagtgatgggccggcccaccatgagcacactgatccagagcctctcccttttttcaatgcatttagcttacaaaagcaaaaggtcagagatttgcatatgaatttaattgactaactccaaagtattgattttgaacaaagctatgcataagaaacttcttggttactgttttgtttcaaagaatctgatgatgtttgtaacatatgtgaaactgcaactttctgaaagtttatttttgttgtttatttctgattctaaaagtaaacggttaggtgaatttgtttgttagcgttgtgataaatttttaacacttttttatttattaaaaaatgttttcaaacttctatttttgtattattactattaaaactttggatatttctttttcaaataatattttggttatttttgttacaaaaattttgttatgttttcaaacttaatacatgttatagatcatgtattaaaaatataaaaataagatttggccaaaagacatgtatagatcatgtatgttgccaaaaaaaactaagaatgtaagattctccactgatggatgtagaagttacagtgatatataatacaagattcttaatacaagaaaatgatcctcggcagcatcacaaaacaagattcttgtcgatcagtttttagaagaagattggaagatgaaaaccgcagctagaacaccaaccaatgctgtaacagctaaagcaaccgtaggcaatggacttgctactccaaaattctgaaataagaagacaaatcaaatcttaagttattctacttctcttacatttctcaaactttcaacttttatataagcaacaatatcagttatgatgtttgattacctcaagaagtccttttccagtggaaatctcaacagtaatggcaactgcaaaaccaaccatggcgccacgaccaagccatatatccaaaccactgcttccttctgtactttgctcacttcttatggaaactgatgctgctctgtttcctcctctacgggtcatactcaacttcaatggcactgaaacggacacacacaacatacaaaaacgaaagaaacaaagtttcaatttttccatggatttactcagctaacaaagacaatgcagaaagcaaaattagaaaactttatgataaatattgttgccccatatttcagataaccaaactatatatgaacaattcagtaatcagaaatatcaaaatttgagcccaatttcaaactaaacttcaaaatgtagagaattgaagaattttctcaggggcaaggaagacgtacagagaggagaaccagaagcgaaggtggatcggattccagcaagttgcggaacatgaacccgacatgtagaagttgggtttgtgattgtggctagctttagggcaccagaatctggaaacatgaaatccgaaactagtcagatacatacattatagagacaattgtacaactagaggaagaagaagggtagcgaagagagaaagaaagagtactgggaagagaaaaggcgagagacgcagacacttgagataaggccatcttccttctacgtagatatcacaagactctccctttcttcttcttctactattctccttccttcgtcttcctttctcaagagtcgcagaattatctgttcaagctgaggacacgtgttttctctccactcattaagttcgtatcttttcgagctacacagttttccaaaacggtggcgtttcacaaacaactgcatctcttagagcaaaccgaacctaatctgaaccaaaccaaaccaattttgaaaaattggattggcttaattaacagattctctacgatagttacatcggttcgttcaattgggttataaaccaatttgtggtcactaatattcaggaaataaatattcagagaagaaagaagcactcaagtaatagaaaccataaagttgaaacatcaaagagacactactctcaacgttaccaaaactgtatgaaagccaaaataacattattgcctaaaccaacaaacaacatcaaatcttcaccggtgagatttaagattcaagaatcaacaacacaccaaactagagcttgaggaaaacgaactcctcaaccgctggaatttccccaatcttcttcagtgtctctttgcttggtatgtcatctactccaatcgccataatcgcttgcttcctcggtgcaattctcccaacgctcatgaagttaacattgacattagactctccaaggatgcttccgacagtcccgatcataccaggttgatccacctgcctgcacagtatgatactaccttcaagagttacatcgacctcaaaagatccaacctttgtcaaatgcgggactccgtctttaacctttccttccactttaacctctcctgattcagacagggaactggcgaatttggactccacattgcttagctgaacagttattgtctccaatgggctctctggtgaaccatccaaaagcacacgttcctctgagagtctgagacctctctgcttggctgtgaaatcagcgttgaccaaattgacatatacgtcagagattggctcgatgattcccttggtgatcatggctcggagaagtctggtgtcaagatcatcagtggctcttgctgaggcgtatgtgattttcgcgtttttcacaccgcttcctccggccaccagttgcactgccagtcttcctagtttctcggctagcaccacatatggtttcagctcggtcagaacctgcagatagaatgcatgtaagcttgagcaaataacaaacatggatagtcttaacaattgaaatcttccaacttgaatctgataagaacaaagctataaaccttgctagtctaaaatccaattcagaaatcacagaaacttgattaatgaggctcttaaaacaaatccctagaaaacccaccctcacttcaacaattttgccgctcactaacttctttctaaccaactcggaacaaatataatttgctacattcattcccaggctagctacagtaaataggctgataagtttgcctctttgaaacaacaccaatatgtgtgtatttactagcacaagcgagtgctcacctcagcagaaaccataggtgcattgactgcagtagcagcaagctctccattcagagctccaacaacagcttcagcaatttcgatggcaactccttcctgtcaaagccaaaacaccaactatataacagaagccaaacagaaatttcatgattaattatcacctgaactgtaaaatgaattgcacacctgagcctccatggtactagctccaagatgaggtgtcacagtgaccctctcgtgctgcacgagcttgctatctttagccggaggctctttggtgaaaacatcaagtgcagcctgcgcaacaataccagcatccagagctctcactaacgcatcttcgtctatgacacctccacgagcaacattaacaattcgaactcccttcttcattttggcaaaggtttcgtcgtttagtatcttcgatgttgttggcgtaagaggcatatgaagagaaatgaaatccgcggtggcaagggcttcatcaaagctcactaagtcaacaccaatggcgtgtgcacggtctgctggggcatagggatcatgagcaatgacacgcataccaagacccttagcacgacgagcaacttccgtcccaactttcccgaatcccaacactgcaagggtctttcccacaagtgaaacacctacatacttgttcctcttccactctcctgcattacaatggtattattaaaaccaagatccacaagtcagctagataacagacaagaatgatcaaaactcaatttcaaaagaatcagcaaatgtaacgatcctaaatttcaccatcgtcaacaacagtacaggaaaaggaaagctcatgatacaaattaataaacacaacaagccatcaatcacaggtatagaaagaacataatcaataaatatttcgcaacatatggaaagtatgaaattgaggcaatgaatcaaaaaggaactaaccagccttaacagacgcatcagcttgagctacgttcctagccatggcggccataagagcgattccgtgctcagcggcagcgatcgtgttcgccgtcggagcgttgacaaccaaacacccaaactccgtcgctgcactcagatccacgttgtcgatcccaacaccagcgcgaccaacaaccttgagccgtccgtgagacgattcgaacacctcacggccaaccttagtcccactcctcacgatcaaggcgtcacagagcgagatcttaatgttgagctcctcaggagtcatgttatacgaacagtcgacattcgcgacatcctccaaaagcttaataccagcgtcaccgagcttctccgccacgagaatcgtaggcttagatccgtctccagtactgcaggaaacgagaacgaggcgtcgctgaagagtattgcgtccacgggaagggaaagccacggagatggctgatggaaggggcgatctggaagacagagtcacgttcctgagagagttggtggcaacggcgatcgaggaggaggcggcggcggtggctgacattgctaccgcttttggagtgtgagtgaattgagtagagaaaaatattgttggtggcggagttataacacgagggagagatctaaaaggttttatagtcggctcaggggtttggtgtgatgtgatagtattttgacgaaggtgatgaaatctcacgcgcatttggctcgcgcgtgtgattcagtttggtttagtgatctgcaaaatgtttcggcgaatagaatttgcatagtttaccggaaaaattgccaaaccaacaaaaaataaaaaaaaatgtacaactttgaggaaaagtaaactttatttattacatatctctctgaccgagaacaaaagattactcgaaaattatttacagctttgaagatttttgacaatgcaaatagagatcttgaagaagccttattttgatggcatgaggagtctcacgatgtctgtcagataatcagatcattgacttaaatacagtatctataaaagattttaacatttatgtcccaaatgaaaagaagacttgtaatgtttttttttaatgtagaggagttactatgtttataatatatccaaatcataagtttccgcagaaatttcaaaatgaagcaggaaatttcataattttgtttttctttctaagggagtgtctgtccatgcttcatgcttgaatgcaacaagtagtaataaaagattaaaaggtccccgcactactagtaaacgaggccatacactagagggagagccgcactttttagtatttgaaaacaaattgaagacttcaaatttaaattgaattggactttctttttgaaaaaactcgagagttttagttttcagggcaagtgatttgtttgtgtcaacttacacacatgtaaatacatcaattgtgaggaggaatatttgaaaggatatactgatggctgtgacgtaagtataatttattgcacgtgaaagatttgcttagtgtgtctttgcaactgcttagatgcattgtttttggtaggtcgacctgttgacaccccccgtatagtattcaacgcagccgcgcgtggatgggtgtactgttgaatcttcgtatatcttttggtttattttggtttactcaactgaaattaccttttatgaaaaatgagtcgacaattaatttactttttttttttttttttcattctttcattttaacccaaccatggtaaagttacaacagcataataaaactcatataaaggcccagcaacataaaattacttatttctttcagttaaggaaaataagtatttcgttatttttttaattgcttttttttttagaaacaataactatctatatatacatttttgcagccactttaacaaataaatcttcacttagcacttatttactatggcatgccattgacatttattattttactaaacttatttttaaatataaatataaaatctattatgttactaaaatttatgaaattaaaaaaaaaaaaaacatttaaatctttccaattagcattaatcaccctgatttttcgttttacatcatttattttcagttaataaaatgaatcaaatcttatattacaatatatgctttaatattttcattaaaaaaataattgcgtaataaaatttgaaaccctaattatttctcaatcaacatttttcgtttcaattgtactaaataattttgctcttttttggcaaaaataaattgtacatgtattaagttgatattgcagattcaaaaaatattaacaaatgcctaaatttaggttattaaaataaaaaatagttagttaaaaacacaagtatatcaatcccaaattatgattaaattaaatatttatttataataatttttaccaaaaaataacattatatatattaaaatttttgaagtactttttaaagtacttttgtgttagtaaagtaagaatttacaaagaatgtcatcacattaaagtcaaaaacaattattatttttaaagaatattagtgatatattttacctttatgaaacattattaatatttaaacataaaaaattaaaatatcatgagacgggaagtatagcagaacgggtttggattgataggaaatacatcgagacgggtttggattgatataacacaggtaaaatatttattttattattttatcatcactaatttttttaattacaagattaatataaaattatataactttattactaaatataaaattataaaatttaaaattattatatatataaataaaatatttgtccgtagtgtaccacgcgttgaattataatatgttgttgtcaccgactctagctagggcttataaatacaaagacgcatagggtttcacaacttcatcaccttaacacaatttgttcgctctctaaattcttaaatctttcatcaaatttgcttcacagtgaaaaacctcctccacaaggaacacacaatgtcttcgaagatgatcgtgttgatgagctccgatggtcagtcgtttgaggtggaagaagcggtagcaatccaatcgcagaccatagcgcatatggttgaagacgattgcgttgctgatggaatccctcttgcaaacgtggaaagcaagattcttgtgaaagtgatcgagtactgcaagaaacaccacgtcgacgaggctaatcctatctctgaagaggatctcaacaactgggacgagaagttcatggatctcgaacaatccaccatctttgaactcatccttgctgcgaattacctcaacataaaaagcttgcttgatctcacatgccaaactgttgcggacatgatcaaaggcaagactccagaggagattcgttcaactttcaacattgagaatgattttacacctgaggaagaagaagctgttcgtaaggagaatcaatgggcttttgaatgagcccatgaatcaaaaccctaactagctttctttttctttttttcgttttttagtgttttctttttaacgtcttgatcgattatgataactttgtctacatctttattatgatttgtgtttctttttatgagaaaaaaacttgaaccatgaatgactaatccgtaggaaagttatcggccatgtctattagtagttgcaatgtagataataatgtgacaaacggaaagaatattatgtgtgctctacatggataacaaatttacatataatcagtaccatcgtccatcacttagactgcatatcacctcttgggagatgtagacaaacaaacattaaactgctagaacacactgaaaataccacaatttctcaccaatacccgatcgtcaacctgacaaaaacaattatccatcaccaatacaacattaaacttctctatggttttatttgactttctagtctatgaaatatacttatgtatagtggagtgcaacgatatcattattcgtaacttcaattgatcctagagttataatgaacgaaggactaaaacagagctgctaataatattttagatcgatttcagaatccaccagtatctagagcaaactaattgttcttcactatgaacatcaatgttttaccaatccattattacaaagttttgtgatatccatataactagtccaccacacacattcagaaagattcatgaaccttatcacgaacttacttgattgtctagcagaagttggaaaggtaagcttgagctaaggagagaccaagctggacttgagcctcggtggttaagtgaagattgtcggactttagcggcaatcccttagcatctacacagaccacattcgacagtttcagtcccaactgtgcttctctcaccttatctatgtatcctcctcccgatgctattgccacctgcttcaatcaaaaccatcaagattaaccaatggaaatctgacctaccgatttctaaaagacaaaatcacttgcaacaactgatatgtacattgtaaaagcctaaaattacataatctgcaacttaactctttcaccaataacacaacgtcacaacctatgtagatgtgacattggaagctaaaatcgcacaaaggatagagagacctgaataatgggaagagaaggaaggttgagatcatgacggaggttcttaatcaaacgatccatattgttcccgtagctctcggcgtcatggatgtccaacacgtcactctctccttgataccacaacaccgccttgatctctccgccgcatttcctactctcctccgttctcttgaccatcctctcgtacaagtggcttccacgctcccactcttttatcgccgttccaccggaagcgcacggcaccaacccgatcacagccgaatctgtttccaggcgattcttcaccgcgttagcgaacgccattcctggacctactccacacactttacctgtgtcaatgtcaacgtgtagtggctcgtgtgcttcttcccaccggagatctgcggacaggcggaggatcgatgagtttggtgcgcattccggtggaaggattttatcccacacccagcgattgttgtggtggtctttgaagacgccgccgcgtcctgccatattgctttgtccagagagtatgaagatctgatttggtggaattggagattggatctccggtttatcttcaccgggagtgatagatcctccttccataatttggtatctctttggtagagtgatgatatcagaatacactatcgtgtgatcagaccatagaaataagctatcgagatgtcttgtctgaatagaaagtaaagtttggtggggtgagcatcagagttgatcggagaagatgatgttgaggcgtggacactagaatcttggtccggtttgggtcggtctgtttaaaagtttggttaggaagttagaccgagttaattttaagtgattcccgttgtgttggtttaattggcttcatcggttaagattctaatttttatatagctttttggttgtgatataacataacaaaacagtgaaacacattctaaactctaaagtaagagttagtattatgcgagggtaaagtaagcattaagcaacacatctaaaacatacataacacataactttctatattgccaaaacgacttaggctatacgaattaagaaatcaaactaaaacacaaattttctccaacacttgcaccaattctttcatggatggtcgcttctgaggcaaggaagagacacattcaatccctaacctaaagcacgccattgcagcatcctcatggcgagcgacatcactcctaattgcaccgtcgattaacctcaagaaccggccattctcttccgctgcagagtcggataagtttgagaactgatctatatcatgatctaccgagaacactttgcttgtgagaagttctaaaagtatgacgccaaaggagtaaacgtcccatttagggtttggtttcaggcttgtggaccattccggtggctggtacggtgagctcgaagttggtccagtggtgtgagattcacgcgctggtgtcatgaggcggtctagccctaaatcggtgatgatgggctcattctcagcgttcaagagaatgttattgggcttgatgttaccgtgcacttgtttcttctcattgatgtaagatagtcctctagccattcctcttgctatcttgagccgtgcttcaaaagtaagagggttttgtaatgacgacgaagaagatgagcttgagcttgccttagctgtttgtgaaggacaaaaaaacagtgatgcgtattttagagtgctaatgtgtaccaaatgacttgcgtattttagatatgatactgtgttttttttttcgtgcgcttacagaaacagaggaacttactggcggtgaagaaacagaggaggctgccattgggaacataatcggaaatgagaagtttctcgtcgtctccccagcagaacccacgaattctgacgagatttgggtgacgaagcttagcgatggcacgaacctccctctcgaattccttgggtttcgcagccgcacagctctccgtctcgatccgcctcaccgcgaatgccgtgccgttctccagcaccgccttatacacgatcccggttccggtggttcccaatatgtaagcagatgcctttagcagagtgtctagatctagccgagtctcgccgtcgactgtaaccaattgagtttgggagctctgcttcagttgcccaccatctgttcgagtgaatgcctgaacggtttgttgattctctacgtcgctctctgatgtcgatgtctcgtcgtaccttcctccggtcaagataatgcatgaaccgcatgtcgttttggcctctggtgattctgggactgtgacctcagtggtgcttggtttcgatttcttggcttcgtttttctccagacagaacttgaagaagctaaatttgctagattctgggtaccttctgcgtttcctgacttggtatacgtagagcacgagtagaccaatgaaagctagaccaactatatctgcaactgtgattgcggcaatggtgcttggctttagcttgctttttcctgtctgatttggtttttctgtcaaagggtttattggagctgtacttcttggtttaactgctattgctggtgaagtagtttcagagatatttggagggtttgaaagagtggaaggaattgaacaaaggatcttcaatggcttcccacaaagctcttggttaccggaaaaagactcagccttttggttaagtaaagaaagggaacttgggattgggcctgtgaggttgttaaaggagagatcgactgtggcatttgctggaaacttctctgcaaaatttggagaaatctcgccgaggactttgttgtgtgataagttcaagtaatgcaggctttttcctcccaaatccttgggaagagagccgttgagaagatttgaagaaagatcaagaatctgtgctgcttcgaaaccacttggaatatcacctgaaaaggtgttttttgacaaggaaacgaccgttagattcttcagaagtgagatgttgagcggaatttcgccagtaaatgcgttagctgagagattcaagagctggagattagtcacactgttgacactcttgggcaaatcaccagagagattgttgcttccaagggagatactctgaagctcagtggcgttgaacaccgagtccgggagtgacccgttgaagaaattgctagacagatccaagatccttagatatggaatcgagaacaagtccggagtgatggaacccaaaaggtgtttgttgggaagtaccaagcttgtgactctgaacatgtctggtgtgttaggcttcccaagctctgtacatgtgacacctgtccacaagcatggtgttgcatcatcatagttccaattgcgtagaacagagagagggtcagtgaggatggagtatttgaaagtaagcagaagaacaccatcagtgttaagagcttggagttgtgtggggacaaaaagaaagtggaagaggactaatgagaacaggaggttgcttctgttggaagtcatggtctttcagttcttggtttctccctctctaactattacatttggctttgcattttcatggcagaaagagagagagatagaggttgaaccactcaagagataagttgttctggtcaccaaatctatgagatagtggagcaatctctgagatggtgaaggagagagagagagagagaatcttaaagagccggagttgataaaataagcttttgactagacttgacatgggacaaggtgtagaatcaatgattcttgatcatatttattcattagtgtaaaactgtaaatgagcagcagcagccatattttcgcatttaaaatctacttcattcactaaagtaaaagcaattcatgggggacagaataattattaccgcttgcttttgggttatttttggtttacatgaagaaaagctaataaaataaagttaaaagtctaaactattgcattttttttctggaacatttcggtccatagaaagtttaaaaggataatcaccgactattattacgactaagtacagtatgtaattgagtaattatatctcaatgtagtactttctcatcttagaacttataagagaaaacccgttataggtttgccaaaacagagggtctcgtatgaaatgaaccatacattaatcaaagacaaaacaagggacaccacaaaactgacatgtcagttatcctcatctttttttttatttttttaataatcaaaattttggaaaaatgaccttgcagagtttgatttttgtgtaaattgttcacacactacacaagttggcaaactgagttaggcctaaactgaatctttcgaaaatcgaaaagttaaaaatatggtcatgaaattattccttagtctaaagactctaaaccaagaaaactatttagccatattaaatgaagttatagctgaaaataaaattaaaaatatctaagaattgaaagaagccaaagcagtagcacaatcaaggagaaaaaaaaaggtttggagaacaaacatgaaagcgacgagagaatgggctatgaccgcatcgctttcagtgtagcctgtggacgaatatataacagaaacaaggctcgaagtggtccatcttatttggttttgagtgagtcacataagaatgagaataattgatgcgaaataaacgagtgttgtccgagagagcaacagtcacacaaaacaattttgtaaattatagtttgttgattaagataataattaggcataaacataaattatcttaatacatatttgcttgcttcattcgcaacaagtaggtagttaggacaatttcttgtcgtgtataagtagcataataataatattcatcaaaggctttagttgagtgttagttatttaagatacgtaatttgtgtaaacgcggagaaagtttaaatggtgatcattaagaatctcacatgtgcattataaaaggggcctatggatatgatggggattaaacctagtcaatttctaaaacacataagataagattttttggacgtaagtaaaaaatacaatctataaagtatattcatctggctggtcctagacgtaacgatcacgggttgatgtcgtttatacaatctataaagtatattcattctctttcttgtttttttttaggtctaatgtttttttttttcgttttcacttcatccttaccccagtgtaaacgtctcatctataaaccaaaagctgtaaagttatatagttatatacatccattcaatgccttggtttttttggtcggaggctgatagctaataatgtgcctatggccgatctgataccccataaaagataatgtcatcttttattgtagacaatggatcttaaatatttgactatagctataaaatatgatcttaagcggatttaatctgtcgacatatttcatgaatatgccatgatgacaacgttagtgaatcccaagaactctgcacatattatatacgtcaagaatgatggtcagattgtacttaaagaatgatctgagaaaaaatatttgttttgacacagatccaacatattactctatatcttagttatggactcctcatagctggtagatgtatagtgttttattctttaaattgtttttgaattctcttttttttttttttttctaatctgaaattttagaaatattaaacaatcatccaaccacttattgtaaagaagagggaatcgtatataaagcccaaaagggtaacgaattatcgacttcaaatataaatatccacgccatgctctcttgtctggtccaatagaggttctgacatagcaccaagagacatctctttatctaccaactaagcatttgactaagttgcacacatttgtaatttcaatttgcaccaccaattgtgtatcaacatttatacatgaaaaaattataatcaacggtcgtacatctaaattagtcttccttaacctaccactcactttgataaacatgaaatcgtcaacgatgcatactattgtaaaagattcaaggaccaaacactcgcatcaagtttcttataccacagcttacaaatattaacgaataaaatataatatgcaagtcgtactttgtagttggatttcgctttcagtcactgtttttagtccgaagaattgtgtttcatatagtaagactcaaacccgacataagggcaaatattttaacacatatatcatatgattcatgattagaaatccaatatcattatatcttttaccactttctcatgaaaaatagtgacacacgaatgaaaaagctcacaaacaaacataagagtgtttaaatcgagtattcgagtatgtataaaaagcctcgagtttcatgatatcaagcgtcgagattgcttccttcgacatcaacgacgaacctataacgcacatcgttcttctcgagtctctcaaacgcagtgttaacataatccatcttcacaacttcgataatcgaactcaaacccttttctttacagaactcaagcatctcctctgtctccttcatgctccctatgaagctccccgttatcactttcctccctaatcaaaccatcatcatcatcattcccaattagtaatcctctaaatcacaatcattaagaaagggttaacttttttaataagggactcaccaagcataagcagaggagtgagaaactgtaatggattgttgataactcccatgagaatgagtttaccatcaagcttaagcagagacaaatatggctcaagtgcatgatgaacaggcaccgtgtcaattacgtaatccaacgaatcagccaattcgctcatcttcgcttggtcggatccgatcacgtaatcatcagctccaagatcttgcaatgcctcttctctcttcttgtttgatgagcttatgacagtcacatggtgacccattgctttggctattttcacacccatgtgaccgactccacctaaccctagtatacctcctcttaggcctggttgtttcagaccaaagtggctcagtggactgtacacagtcacaccagcgcacagtagcggcgcagcctgctcaaccgccattccttctggaatcttgaccacaaacctgaacacaagaaattgaccctttagccaaacataccctaccctgttccccaagatacctaaaccaaaacctaaagatccggtttgaagcttgattttctattagataaattcaaattcatatgcatctctttgattttagtataaggatatttatgagtagttagtatatgccaaaatcgttagttgaacaacaccaagattatgtgttgaaattcaatcataaacttggtgggatttttgtatattatgattgaatttcatcacatactttatactaatttttttaaaatcattgatcaaatagcacaaagattattatcactggatttcaagatcaccgcaatcaaataaaacctgtattaattaatttacgaagatcaagataatcataaaagttaagaaagaaaaagagttgtacttttggtgaacgacggtggctttagcgaagccgccttgtgtaggttgaccattgatgtaaacatcattgtagctccaaatcttctttggacaatactgttccagatctctctcgcaggggctacaacctccgcaacatccaacgaggcaaccaactccaactatgtcccctacggtgaacttgctcacatctgatcccacctccactacttcccctaccacttcatgcctgacaacatatcactcgatctcagattctattgtactctatatgtcattttcatcagaattgatcaagaacaagaaagaagagattattatacccaggaaccatggggtaattagacatgccaagatcatttttagtttgatgaagatcggtgtggcagattccacagcaaatgattcttatgttcacatcctctggtccagtctctctgtaatcaaaacacacaaaagatgatgaaactgaaataaatcaaaacaaaacacaaagatgtaaaagaagaggaaactaattaaaaacctaagagtgtaagtgtaaggagagaggatcccagatgggtctctggcagcccagcctgttgttttcctctctgcctccattattcccattttttgatgattctttcttctttcttatcttgatctgctgctttcacgcttttgctgtttatgtgtgtgtattactatatatatatatagagaaagttggaaacgtaacgtatgcgtatgtgtgatgaaataattggtgtttctgcatagcacacatttgatggctataattgagtgtaaatttgtgtatattattgacaaaattagtcaaaagcttaaaatcttttttagtcgttgaaagatccttctagaaaaagacattttttttcttcttcttttcatacgatggctcatggctgtgtagtttattagaattttaggtgaaaaaaatattagaagccaacaaaacttaaatgaaatttatttgcattcataattcattttaccagtttataacaacaacgtaatccaaaaagtaaaatgagaaagaatggaatttgtgtactttgaaaggaagaaaaaccactattgacgtggacacgtcggctaaaggagggtccacgggggttggtgaacaaacaatgtggggtctaatcgtgtgtttgctttggtttaaaatcatggttggccacgtgttgattcttgacctctctctgacatgaaactgtagcattgacggcccagatcagctgcgagaatacttcccacaaccatggaaattttacggcccagatcaacaaagaatcgatttgctctttactatttcgaagaacaaagagtgacagttatgaataatagaaaagaaggacaaagagtgtgtgaatggcttcacattaaaacaaaagcccattatgaatgacccattcacatttcacacccagtttgaaaaatcgaccgtccaattaagtaacattcaaaaacccaaaagataaacctctaattcacgaatcacaacagcagcatgagccgtttcatcacgacgttatctcagagtttcttggaaataatttgttgtagcggacttgtggctgtaaatggggccaatgcttaaatttacttgtctcgtctcttctacacgtcttctcttccgaccacacccttcattcaattcaacgtctcctctctggctctctctctcaaatatataaacaccaataatgtctccaatttgagatttttaactgaacccaagtcatgacgaagcttctagagattaatcatattcaaaccctttgttttgccaagggtttttctcctgccaggtaacttgaaaaacctgctcatcagggtttgagattgacttgttcgattctgcttctccaaacaagccttcctttttatgtgaattgcgttttcggtttctcggtttcctgtataaaagagttacctttaagttgaatttggtctagaatgttaattggagcaatggatgcttctgtgaatgatttggtcattcaatatgatatgattagatctaattagtaccattttaatgaatggcctcttttgttgcagattaaatgttgcaacttcaccttttcggatatctcgtcgtggtggtggtggatattgcagcaatgcttgtatcccttatcggttgaaattgtaagcacatttctttattcacccattttacatattttattcacaaaagtggtttttacatactgattttttgatgattacctttctatttagtatagtgggttttaagtttaagtacagtggtatgaataaataatcgtgagaacagttgatacttatccatgtttttttagtcttatccatgatttttagtcttaaagtctctcacattgcggttttggtgtcttgaatcagtacttgttatgcaacactatctgctgtggtaaaggagcaagcatcagactttagtggaaaagaagcagctttgcttgtagatgagctcagaagcaacttcaactctggcagaacgaagagctacgagtggagaatttctcagcttcaaaacattgctaggatgattgatgagaaggagaaatgcatcaccgaagctttgtatcaagatctttctaagcctgagcttgaagcttttctagctgaggttttttatataatttcaatgtcccgtttcttcactgcattccacttatccactgttgaatctctttggtatttttctcgttttttagatttcgaatacaaaatcatcctgtatgcttgcaatcaaagagttaaagaactggatggctccagaaacggtaactagaccgttcaagctttgctgcttcattgatatgtgtcctttctaaaaccacttgctttttctatgcttggacctttcaggtcaaaacttctgtgacaacatttccctcgtctgcacaaatagtctcagaaccgcttggagttgttttggttatttcagcctggaatttccctttctgtaagctcaattttatttattgacaattttgtctcaatttctaaactattaaagtttatatgtcttcatggtgctttgtttttttccttagtattgtctgtcgagccagtcattggagctattgcagctggtaatgcggttgtgctaaaaccttctgaaattgctccagcagcatcttctcttttagcaaagttgtttagtgaatacttggacaatacaacaatcagagttatcgagggaggagtccctgaaacaacggcactactggatcaaaaatgggacaagatctttttcactggtttgtcctctctccttttctttcaagaatctttgaaatgttgattaggatctcaggaaaacattattttaaatagtttaaagtatttctttaggtggagcaagagttgctcgcattataatggctgcggctgcgagaaatcttactccagtggttctcgaacttggtgggaagtgcccagctcttgttgattcagatgttaatctacaagttaagatctttctctgcttctaaagcataaaatagttaaattcaggtctcatactctaattgtggtgttgtggttgaaggtggctgctaggaggatcattgcagggaaatgggcttgtaacagtggacaggcttgcattggtgttgattacgtgatcacaacaaaggattttgcatcaaaattggtaatggctacttgaaataaaagccagtgaatcacaatgccttatatgtttctctcaatcttgctgatgcaaaatcatgtggtacagatagatgctctgaagactgaactggagacattttttgggcaaaacgcattagaatcaaaggacctgtcgcggattgtgaactctttccacttcaaaaggttggaaagtatgttaaaagagaatggagtagccaacaaaattgttcatggtggccgaataaccgaagataaactgtgagagaaacatgtttccattccatgacattgtttcatggtgatgaaacaaactaataactgtgttctgtacgttccttttacagtaaaatatcaccaacaatactactggatgtgcctgaagcatcttccatgatgcaggaagagatatttggacctttacttcccataattacggtacaaaagattgaagatggctttcaggttatacgttcaaagccaaagcctttagcagcgtatctcttcacaaacaacaaagagttggagaaacaattcgtgcaggacgtatcagcaggaggaattaccatcaatgacactgtcttacacgtacaaaaagaagtcttttgtcatacaaaaccaatgttccataatgctagcacttattaaagatggtttgttttgtctgcaggtgactgtaaaagatctgccatttggtggggttggggagagtgggatcggtgcttaccatgggaaattctcgtatgagacgtttagccataagaaaggagttctttaccggagcttttcaggggacgcggatcttagatatcctccttacacaccaaaaaagaagatggtgcttaaggctttgctctcttcaaacatatttgctgccattttggctttctttgggttctctaaagactcatgatcacatgttataatcactgaacttgctggaatagtacaactgagaaagttgaatatttccatagagaaactaagatcaataaaactatagcctcccctatatatgtaaacagtgaataattttagttacttgaataacaattttacatagttactaggacagctaattatatattggaaattccttctgctaacaaagtgtccttctggcatttccacacaaatcttggataccctaattattagtctacgagaacaaaatcttagcctaaatcaaaggtcacaccaaattacaacagagagcagttgggtcatccctcgattcctccaaatgaccacaccatgtaacttattatttctctcccacataggttagcttaatctaagtgttctagctcttagggactaaattttataattaagagataaatagtagttatgataattgaaaatgtattaattagaacagctgttatgggaaactctattggctcttccaggtatgatggagatttgagatctactagttttcataaatacgagaaaaaaggataaaggaaacaaaattagttagggtaaagtcatccataatgtcaaatctcaccatgtttttatctaacacgtcacacacaaccaagtcattatcaaacataaatttcaatttaatttgtttggtcatgaacaactggtaaattatatggttctcttctccccaaccatatctccttctacattatacgctttgagatctgtgcaccattcttcatctttaaaggagtaagtaaaaaatatcgaatataaaatgtgcacagcccataaatgacttgtatctactcctccattccatattcaatttaataatttatttttggatagatgaaatagcatttaatgtcctttttttttatcacgaaaggagattatatttaggtgtatctttattttccctctagggaattttttatgttgaattctggtgtttctttacttatagaaatagactaccaagattgatagattttttgttaggttatgagaatgtactgtgtaacttaaaaaggtaaaagcccaagttacctgacatagacttaatattcctgaattcttctgaagcaaaatgatgcgaattttatggatatgagtaagaaaataggtggttgtttgttttactcgcatttactaccttgagtgttgcgtcaatttcgtttctgatttgagaaatgcacatgtttgttttctcgcatttatcattttctagcattatttataaagaatgacaaatgttatcaagagaagcagcagcatattttataactagtttgtcaatgtcttaagatcgatatgtagttgtgatgtccaatacttttgtgcatacaccataactaaaatctcaactaacatagtgaatttcgaaccactctaccatcataagttgttaatatttatttttctaattaaaagtggtaaattttgatcattttttgtgagttttctgtcgatttatgatatcatttaccggataatccaactagttgggtcgggttggctaaaagcattgtcagtgaccacgcatgcatctattcgttgttgagagtgaactgataaacgccaaagtgtctccatccatatttatattcaaaacttcaatacgtatatgtctccacatggctcgaccatcctggtctgtggttagcacttagcacctttctaagccgttatctggtttgcgtgatccgtgtatcccccctaaaccggtatattggtttggttacattgatattgatttttcatttgaatccttttttttaattgattttatgattcgttatagatgaaaatgaatttattattcccaacaatgcatatgccctaaaatttctagatacctaatctggttagaaacttgcaaactttgattaggtcgtcgttatccaaagaagaaaatatcacaagaaatcattcatgtttttgcttatttattgctatcatacattcattgcatgcatgtaggggactctctctcccttcttctcgactctctgactcaatcaacctctataaatgtaaaacgagtcagaaggaacaaagacgcacatcaagaatttaaatcactaaaatggattaccccatgaagaaggtaaaaatctttttcaactacctcatggcgcatcgcttcaagctctgcttcttaccattaatggttgctatagccgtggaggcgtctcgtctttccacacaagatctccaaaacttttacctctacttacaaaacaaccacacatctctaaccatgttcttcctttacctcgctctcgggtcgactctttacctcatgacccggcccaaacccgtttatctcgttgactttagctgctacctcccaccgtcgcatctcaaagccagcacccagaggatcatgcaacacgtaaggcttgtacgagaagcaggcgcgtggaagcaagagtccgattacttgatggacttctgcgagaagattctagaacgttccggtctaggccaagagacgtacgtacccgaaggtcttcaaactttgccactacaacagaatttggctgtatcacgtatagagacggaggaagttattattggtgcggtcgataatctgtttcgcaacacgggaataagccctagtgatataggtatattggtggtgaattcaagcacttttaatccaacaccttcgctatcaagtatcttagtgaataagtttaaacttagggataatataaagagcttgaatcttggtgggatggggtgtagcgctggagtcatcgctatcgatgcggctaagagcttgttacaagttcatagaaacacttatgctcttgtggtgagcacggagaacatcactcaaaacttgtacatgggtaacaacaaatcaatgttggttacaaactgtttgttccgtataggtggggccgcgattttgctttctaaccggtctatagatcgtaaacgcgcaaaatacgagcttgttcacaccgtgcgggtccataccggagcagatgaccgatcctatgaatgtgcaactcaagaagaggatgaagatggcatagttggggtttccttgtcaaagaatctaccaatggtagctgcaagaaccctaaagatcaatatcgcaactttgggtccgcttgttcttcccataagcgagaagtttcacttctttgtgaggttcgttaaaaagaagtttctcaaccccaagctaaagcattacattccggatttcaagctcgcattcgagcatttctgtatccatgcgggtggtagagcgctaattgatgagatggagaagaatcttcatctaactccactagacgttgaggcttcaagaatgacattacacaggtttggtaatacctcttcgagctccatttggtacgagttggcttacacagaagccaaaggaaggatgacgaaaggagataggatttggcagattgcgttggggtcaggttttaagtgtaatagttcagtttgggtggctcttcgtaacgtcaagccttctactaataatccttgggaacagtgtctacacaaatatccagttgagatcgatatagatttaaaagagtgagtgattctatttatcgttattaagttatgatacgaattaagaagatagagacgtatagactggttttatatatcgactatcgtactttaatttggtcggtccaaatatgtacaactaatctatccgttctctatgtattgttctcttttaagatttcttgttttttttttctttggttgttatgatgcttaattcctctcgtcaactgtttaagaataagatttgatgcgtggtagtggacttgttttcacacttcgtatatatatgaccttgtttacttttctacaaagaagttttatcacacatatttagacagggaaaacaagaggaatatatataaatgtaaaacttgccttcgtgtagaagagaaaatgattttcttaatttgatccgtaaaaatgaaggcaagtaaactggagtgcttgtacttgtagcatttaaacaaactcgagtgtgcaataattccacaagcatgttactttaaagatgggaagatgatatttagcagatcgatcttgcgcgtgagatgacgtaactgttctcggtaagatttgtctttacatgaaacagcttgagaagcccatatctaaatatctctttaatcgtgtgccaatcaattttcttatgtttggtttgtctatatagatatatgaccattgtattaatcatcacaaacagaacagttggaagtagatatattaattcatacccaaatctttcaacaaatttttaagtccaacaaaatgtcaatatcacaagttgcaattgatacctaggatttttcattaatcaatataaaaaccaaaaacaatctgtaaaccctacagcctaaatattgtatttattatcaaaacctatataaaaccctcaagtcataaaaccttaattaatattattaaataaatataaatagatttgaatcaagatcacgtcatgtttgtttgattttatttcgcttcatatcattgaagaaaatcataaaaccacatgagatgaatatcttcgacaacgaatacaatcagcgtaatatacggcttggatgatatgactatagatctttcagtatctatttaaagaaaaaatgacgaaccaaaataaacttcattcgtttgttaattaagagattattattttttcttagataaacgaaagtcggtggatagaaaaatattaaatgctcaaattattatggttggtttagtcttctgaattcgtagaaaattgagatgagctaagcaaaaatgttctttatcctcgtgagctgctccaagaagtggttgatgatgtaatggacaaactcgtttcgtggatcttatcattctaggctatggaccaatatggtgcagtcgacacgttcggggctttgtctgcattttgtggtctcgttattctgagttgtgatcatcattaataagtgagttgtaatgcattacaaaatcggtttgtagttattcatcctttccaaatcaaaagtgacatattgacaattttgaggcaagctttttgtttttataataatactaattagattacataatcttcaatttatattatttttaaaattagaaaagagcatttttaaagcaaaaattacattgaatcataaagaaatattggtttaatttatagagatgaacatgttgataattgaaacaaatttatttaattattttttgtatgcactcaactctgtttggcttcaatcatataagtataaaatataattaaaatgtttttattaaaatattagatttcatgattcttgttttagtatataaaaaaaattgatatctccatatcgctagtgaatagtgcagtatctctttacgcgctatttcaagaccaaaccttttctctcttctagagtgaaactgtggaagcaactctcacagagcagcaatggcggagaagtcgagcttcttcgttcatttcagctgtcttctgcttcttctaactatcataataacatgtggagagggagtgaggaatccggtgaggccaagatcatcggagagaagagcattgatggacggccaagatctctcgaggccattgaagctgacatttggtgggccttctcgtaattggactgacgctattcccatcggtaatggccgtctcggagccacgatctggggcggcgtctcctctgagattctcaacatcaatggtaaatgttaaaacggcgtcgttttttttggatttttgtccttttctctcccattctttgtgttgttttttattttggagatttggttaataaatgctatctgctgtgttctctaaaatctattgtcagagatcaatcaatgttcttgtttctgaacaggggattatgcttgagacttgaaataaattgtgtaaatgaaatacattgctacaaaagcataagcatttctgaatcttgtttccgctaagatgattttgtggattttgattgatagaggacacaatttggactggagtaccagcagactacacgaaccagaaggcccctgaagcattagcagaagtgaggaggcttgttgatgaaagaaactatgctgaagctacttcagaagctgtcaaattatcaggccagccttctgatgtatgttctattcttttggtgaaaatgttgctttcacttcttgttttttgtttgttatgtgtaaagactaatccttttgtttgtggcctctaaaggtttaccagattgtgggagatttgaatttagagtttgacagttcgcatcggaagtacactcaagcctcttatcgccgtgaactcgacttggaaactgctgtagctaaagtaagttactcggttggggctgtggacttctcaagggagtttttcgcttctaatccggatcaagtaataatagccaagatctatgcaagcaaaccgggatcattgtcttttaaggtgtcttttgacagcgagttgcaccatcattcagagacaaatcccaaggctaatcagattttgatgcggggaagttgtcgccccaagcgacttcctgtgaacttgaagaaaagtatcaacgcgacaaatataccgtatgatgatcacaaaggattgcagtttgcttcgattcttgaagtgagagtcagcaacggtggctctgtgtcttccttaggtggcaagaaactaagtgttgaaaaggcagactgggcggttctgcttctggcggcttcatctaactttgatgggccatttactatgcctgttgattctaagatagaccctgcaaaggaatgcgttaacagaatcagctcagtccagaaatactcgtactctgatctttatgctcgtcatttgggtgactatcagaaacttttcaaccgggtctctttacacctttctggaagctcaacaaatgaaactgtgcaacaggcaacttcaactgctgaaagggtgcgatcatttaaaaccgatcaagacccttcattggtggaacttctattccaatatggtcgatacctgcttatatcttcttcaagacccgggactcaggtggctaacttgcagggtatatggaacagggacattcagccaccatgggagtgcgttttcgccttactatcttttcttggactttcatagcttttgttgtatcactaactccacttcttcttctgcggtattgcagtggtgctcctcacctgaacattaatctgcagatgaactattggcattctcttcctggtaatatccgggaatgtcaggaaccattgtttgattatatgtctgctttagcaattaatggccgcaagacagcacaagtaagtttctatccttttttctaatgatgacctttgcaatgcatttgtgctccatcactagagacattagtctaagtatcattttgttgcgctgtataggtgaactacggagcaagtggttgggtggcacatcaagtatcagacatatgggcaaaaacttcaccagatagaggtgaggcagtgtgggcactctggcccatgggtggagcttggctctgcactcatgcatgggagcattatacatacacaatggacaaggtatggacctcaattttctgattttcaaatcagtttctttaaccggtactatgtttaatcagcttttacttgttgattcatttctaggaatttcttaaaaagaaaggatatccattgttggaaggatgtacgtcgtttcttttggactggctgatcaaaggtaaagatggatttctccagaccaatccatcgacttcccctgagcatatgtttactgctcccattggcaaacctgctagtgttagctactcatcaaccatggacattgccattataaaggaagtcttcgctgatatcgtttcagcttcagaggtaacatgaagcaacaaaaacaacaaaacaatcatatcacctcatggatactgagcttatggtttctggtttatcaacagattttgggaaaaacaaatgatactcttattggaaaagtcattgctgctcaagcaaaacttccacccactagaatatcaaaggacggttccattagggaatgggcagaagactttgaggacccagaggtacatcatagacatgtttcacatctctttggcctcttcccgggtcacacaatcactgttgagaagtctccagaacttgctaaagctgtggaagcaactcttaaaaaaagaggtttgtgtgattctttcttctctcccattactatttccacaatttcatcgacgtggttggagcaatatataatgttccactgattgacgcaggagaggaaggaccaggatggtcaaccacctggaaagccgccttgtgggcaaggcttcacaatagcgagcacgcatatcggatggttacacatatttttgatcttgtggatccgttgaacgaacgtaactatgaaggaggactgtatagtaacatgttcactgcacacccgccattccagatcgatgctaattttgggtaagttgttgcaaacacttacctataagatatgtggaatgtttacattcacattccaacgcactataccatttgatgactagtctaaacttacacatgagcttttttccttggcagattcgcagcagcggtagcagaaatgttagtgcagagcactacgaaggatctatatttgctcccggcacttccagcagataaatggcctaacggcattgtgaatgggctaagggcaaggggcggtgtgacggttagtataaagtggatggaagggaaccttgtggagtttggtctttggtcggaacagattgtttccaccagaatagtgtacagaggaatctctgcggctgccgaattgttgccagggaaagtctttacttttgacaaggatttgagatgcattcggaccgacaagttatagaagtaagagactcaatctgtttttgttcatctaatagaggaagtccattgtttctcatcgttcgacgagttatatgtgcaagtgtaagtgtgtaacacaaatgtatccaaaaaggtttacagtgaaatcatgtatcttggtatcaatacttttattgttatttggcttcacattgtatcaacaacattaacatgaatcatatgaaattttttcacattcaacttcctaattgtaaagattgactagccttgttcaaagcacattacaacaggaaagagaaaaaaaaaaacagaagtaagaagatagttaatgatgtccttcatagtggtaatagacccttcttcttcttatgcagttcagtcactcgatttgcactaaacttggaacgtaggagcagacaactaggtcacaatgctcgcattcagattttgtcaatggaacccgagaaagtatctcactaccaattcatctggaagatcggatatcatcgtcatcgttcaagaaattagggttcccaaatactaaagtgtaaatgacaaaccaaatctctataccagaaaccaaaccaattaattttattaaatcgatcgattatagcgaaaacaataaaccgaaccaaaccaaaccgagtctctctcgctctctctcgtttagggcttatttactgagtttctgtagtctcttctttggttccgtcttcgagattgatctgatttgctttgttgttttctttctgctacaagtagataaaaaatggcatggcgcagtgcagcacgctctttcgtctccgctacagctagagctccgtctctccgatctccgccgccaacgcttccccgcctccgtccttcccaatcctctttgccccgccgccgatttgcctctttcactaatcccaggtttcaccatttctaaaattgaaatccctaattcccgttgataagaattgaaaaatgtttgattttatcatattgagattatgatagcattggccagaaagaaacatgttttgtaatcgtgtacaggaatttgggagagctaggatgcacagagtcattcttgcctctgtacaatgttgtggctgcagcgagactcacatctcaccttaatgttaatctgcgagctttctgcgaactctctaacggtaccttcccacgcacttgtcaagatcgctaattactctccatttgtgagtgttactgctcttaggatttcatttggagtggccaagtttttaaagttttgaagtatttagaacaaatgttttcgtgttgaagtagaatgaaaatggatttggtcgtttcctttttgctctctgtaaatcaagtttggtgttaaagaacaatgggcttgggattattgatagggaatggaaaagatgggtgatggaagtggattttcagtcgctggcaagagaggtgctactgctttgtaggtttcttgtccatttttgtttttgtgttttatgtttaggagctaaccaaacttatatatttctcttcatgtatgcaatcatacaatgcggtaaagctttgaccctaggtctaacatcgtgttcattcatgctcttcattctaaagatatgagttgttatatgcactgagaatttagcaaaactgggcttcacataaagatcctgccgtttagatccttagagaattttagtttagtatagtaaaggtcataagcaatctcgggtaccttcccaaaagagaagatgttatgtgttcatgatatccaatcatttgttgtactatatatggatttgtattagcatgttgatgttttgaatgtctgttacaagtttggtctgaagatctgttttttgttctcaaagctttacctgtgacttgatgatggcaggtacttgaatgcacaaagtggatgcatcagttatcttgaagcagttggagacttgagaaaaggggtgtaccaagaagaactcattggttgttttgtgttccattaggaaccaaaaactatatacattattatcgatcttccttcgcttttgtcaatttccagttttagaatatcactggatttctcttcatatttcttgttgtttagcccaatggctttaaatacttgagggtagattcagcaaattcttgaagaaccattgtttcatcgttgtatttataatgttatgaactcccttcgggtttcctgaaaggaatttaaagaaaactttcttatagtgaaaagagttcgagagtcaccgtctcttccaaagtgtgataattggccgcaggcttttaaataactacaacatttgaacttatgcatacgagtcactgcgttattgtgtatacactaattatagaaattcaacagtgagggggaattatggtgggaacaaggtagggaacaataagagtgtaagaacaacgtgaaaagggtttgaatgttcatatgaaaccaccacaataagtcagtggagtaactccttacattaacaaattcaatagtaagtagtttgtttggctgtaaagaaagctcatcggtacgctcttttagatataatttgcaactttataaacagcttaaactttactagggatcttcagtttctgtgtcgtatgcttaatcactggaagcctctgactgatggagctcgggtcgctccagactgctaagtcaactggataccctttctgcatatatatacatattcaagagttaaatcacgggaccttctgtattcactaacatagaaacattgcaatatgtcatcgtcttgtaacaaaaagattgtggttatttgcttgctgatgggaaagagacggatttgaataagaacaaagattggagatggtaacaatatctagtaatctgtcctaaaagtgaagaaaactaaccgcagatagagactgaaatgttgcttctctccaacagttttcacgaagaacagttggtgcctcatcttcgccaaacctataatgcattctcgtctctctcaatctcataagcacaccatcaactctcagctattaaaaagcaaatgagtggaagatgaaaatcgaaacgtcaaaacagtcaatgaagatcacatattggtgcgtaatgactttatttttctgactatggattttcctgattgactcacccaaaatcgcaagaggaggaaccatgagcttggcatgactctctgaaaaaacacaaacagacacgcacgcacaggtactgaactcattcaaattgatgttattgtgaaagaatgtgactggaaaaacagactcgaaaatttgatctttaccactttcacagtcagaagtgacactccattgtcagccagttcatcttcatacaaaactacctgaaggagtagagaataagtacatcaaagggcccagaaaaatgtgtgtttgagtttgtatcgataaggtgaccaacctcatcatagaagagaataggttctttaagtgagagagcagccaaatcaatctgatcttcacagttctcccactgaagagtagcttccccctttggattagcttttgcctcaacctgcttcacattaaaaaagcatacagcaatgagcatgaaagtcacacttgattgattatcgtgtgacagacagaaaaagagtgaaaatgagagcaaggcgaaccgtttctttgtctttctcaactacttcacttccacagtatggcgttgtaaacgtgtaatcataatctagtatcacctgctgagacggcttgctgcaagtagatcagagtggtatcagatacaactatcaagcaaagcttccctattgaaaagaataatatcttttgtgatatatttttcagtcaaatcctgaaacttacctcctgaatttccattgtgctgcagcaggaacttcaacaggtggaagcccttcctgcttccaaccagctagtgcgtcaaacgcattaaaatgaatcttagtgttgctacctaagtgtttaaggactaatgcattctcgccaaaaaccatttcaggtaagtgagatgtcttaagctttttttcccacctgtgttacaatcaaacatcacattcgtgaatctcagaagatgctatttacatatttgagataaacagagagctataccaggaaatgtgatgagcagagatcggaacaactaaaatcagtaaccacaaaaactaaaccaaagcaaatacgattttgattttttcacagaatagatcatacactccaccaaaaactaggaaaaactcgaaatcaaggacacaattctgatttccttcgatacgttccactaatacggtgtacacgagctcaaaaacccaaactacactactcagttcatcaaattaacgacgagcacaaatacaaaaccgtaaacacaaatatcacctacaagtaatcacagacaccaacaaattcatcatatatgatcgtatcttatgaggtgagagagatagagattaagtactcttcgacagcgagagaagtgagaatcgtgccgcggagggtttcgatctcccagtcatggatgcgtaaacctcgacgtccgtcgggaagaagctcagccccggaagacttcagaacatctttatcgaccaccgtctccatctgaatcgccggctaatattggcactaccttttctcctccgacgatgtcacttgtgtgaccaaccggactatccaaccaagacatttgacttttgatgggccggcctagtttcattttagtttgaaaaaagaaggtcaatttgattttggtccttaatgggctttaagtttataacgtaggcctttttcataataatgtaatatagctagaatttcatgcttttggaacacactataaaaaaggtcaatattcaatgtttcttttttcattattagtagatttggctaaataaacctctagaggacctagaccaggtttgaaacctgacatggtggaacaccactagcccacttgttctctcaagctcaataatatccatataaatcatcaaaagatgaatcaatcacaaaaattcacaactaatttgcacgatacacctcatgaacaaaatattcgtcgtcattgccactattaacgattcaaagtggtaaaaaaatcaggaagcagtgaaaggtgaaacctcatgaatctctagactctaatgcataaacatatttcattatatatcgtagtagaatactgagacacattgacatatataagtatcaaacagaaattgtataatggtatctttattttattaacacatgtgtgcgtcaatgtgaatcagatagaattagacacactatctttttaatatttaaagttggagccgttttggtcaaaactaatttatgtgcactactcatttatttataggttttttaaaaacacaaaaattgtgaaaaagcttctaagccaggtggcgggttttggtgcaaagtctttgatatgttcggagttgctgcttcgtagagaaaaaacttttctgataacatcggagtaaaaggaaagtaagtcggagtttaatcatcttaagatttgattgaatggctacgctcactgaaatagcaacccttgaggagaagtgagttttttcttttcaccttctatttctatgtgtatatcttatctactcttttgaaattaagacagaaaagttagagatgtgttcgtaggattgggtttttgtctgaaagactgaaactttgtaaataccttttcttaaaattgatgagtttggaggaacggtttcagtaaattaggttgtgtttcgattctgttgtttttgtcggtgttcttcgtgagaatttgtctgaatttctgcatcttcctttgattgaggattgttttttgattctgttctatagcttttgctcttaaggaatcaaagaaggcaagtttttttgtcaagtcatggctttttttctgtttcggggtgcttattaatttgtttaattctgggttatttagttataatgtgtgctaagtgattcctctactagtattcaagttaatggatttgattcatctttggttttaggtatatcgaattgtgcaagatgcatggaatcctacccaacactgccattttatctgctttctttgaggtttgattactttttccttgtccagaagatctgtttagcttaatcttagtgttagtctgagtataaactacgattgaacctgatcaactgaattttaggcggaggttaaaaagtcaaggaatcaaagatgcattatgaacctttacgtggatagagtgaagtacgatgactatctcccgcttctcgagttatgcaatgagatcaacacatctgaggtacaaggaatagatctatttgtgagatccgcttgttcgttagaagatcattatgcattgcccttaatccgttccgtcaatcaaaaactccgagttgttcatctacatgactctttcgggaaaaacttctggcagtaagcaatggttttttgtctctctttttttctttttgcattatttctgaagttttccattttcattttggtgattggttttttactttcagggacgttttctttcaaggtttgagctgcaaagtgttgaatgtgaggtctatgcatatccataagcttaacatcgtaggagagttcacacagctgcacacccttatactcgataagaaccgtatagttggttttggagaagactgtttttcttgcatgcccaaattgacatatctttccatgtgtgacactctagtgtcagatctttggacatcagctgctgctctcttgaaactcccttctcttaaggagctccggtttcaaatttggatctcttgcagtgattctagcccactcaattcagagtcatcaccatcatcatctaccaaggatgatataaacacatttattgaatcagaccctcccgttgaagcagatatgtgggacgttgctgaacagatggatcctagtttacctgtcgaagagactcttcatagcatggatttctcgtataaaattcctgagcaagatgatttggattcacatgtctctgtgtctgcagggttgaatggagaagtactcatgagggaaaaggtaaaaacaaaacaaccaatttttcttgtttgtaagtcaaacaatgagacaaaacactgggatggttaaagcttttttataccattttggcaggttaggagagggaaaatgccgtaccaacccaaagatgtttcacccgttgatacgttcacaaggcaatttgggaatgttgggttgaaatatatatcctctaaagcatcaccgatctgttctgaaaagcattacaggatgtacatgataaactctctgcccaaattacaagtgttggacaatttggccatcagaaagagtgatagagataaggccattgaaacatattctgcaaactttgaggacttaccgtacaagagaaagaaggaaagtgtagttagagtccttgagaaccgtgaaaaaagatcaagcaaggggaaatctcagaattcctataaaagatcgctttgtgcagctaaaatgggatcgcctgcttcgcctctcttgcattcacttccttttttgagtagtaggattcagcaggaagatgataatagtagattatgtccaaggcagtttgagtatcatccactagatcctagcctaatggtatttgggactttggatggcgaggtggttgttctcaatcacgaaagtgggaaaattttccgttacatcccatctaatggatctcaaagtaccatcttgggactttgttggctcaagatatatccatctatggtaggattacaatttttcggctaccaatgtttctttcagttatgttagttgtttatctcaaagtgttgttctatttccaggttatagctggctcagccaatggctcattgaagctgtacgacatccaaaaagcgtcatccacggttactactagcagtcattccacttctggttctgtcacttttgatgagtttgaccaattaacgtcggttcatgctaattcgacggaccaactatttcttgctagcggatactcgaaggatgttgctttgtatgacattggtaggggaacacgcctacaggtttttgctaatatgcatcaagagcatattaacgtggtgaaattttcgaaccattccccgtttctttttgcgacttcttctttcgataaagatgttaagctttgggatttgagacaagagccatcccgaccatgctacaccgcttctagtacgaaaggaaatgtaatggtttgcttttctccagatgatcgttatcttctagcatcagccgtagacaacgaggtactctaatggaccatttagttttacttatgaagctttttgcatcagattagccttttggatatatttggcgttgttctattgatttttaacaacccattgaccattttcccaggtgaggcagcttttgacagtagatggaaggcttcatctgaactttgagatagtcccaagagtaagctcgatgaactatactcgatcatactacatgaatggtaatgactacatcataagtggaagctgcgatgagaatgtgatccgtgtttgttgtgctcaaactggaagacgacttagggatgtaactctagaggtagattgtttcttctaaactataaaacatggaaacaatcgtataatatataaccgtatgaatgtgactttacttatgtgatttggtttggctttgcagggaaacggctcggacttttccatgatgtatgttcagtctctacgcggtgaccccttcagggtaagttgacaaactttaccaatcaaatttccattgataagaaagttttatggcattttcaaaacttgtgtattgctaatctcttgcaggatttcaatatgagtgtattggctgcgtacgcacggtcaagctcactttctgaaatagtcaaggtagcgttattaaaaaaacagtgcttctgttgtatcagataaagttcccaattcttagtactgttgatgacaaaaatgttactgcaggtgaatttgttagcgtcaagagattctacagcagaagaatctcatggtctccgttcctacccttcaagtagcatgggaggctgatgataaaaccaaaagagaggcttcacaaaaaaaaacaagtgactcatgtattgttgtatttattgtactaatagaatacgatgaatattaaaaaatgaaaatgttatttttcggtgataaataaaaaaatagtttaggtcgaacgacgaattttgactatataagcaaaacttccgaggaaaaggataacacaaaacctctcgtcttctcaaatccactctcatacacagtcacaacaatggctctttcttctggaatcttctctactacttttctctgcgtcgatacggcgccgttgcgcagctcaatgttgtctccatcttcgctccgtttgtcccctaatcatccgactaacctgcgcatggttcgagctgtaacttccgcggcggcggcttcctccgacccgacaaccacgaccaagactcgggagccacgtggcatcatgaagcctcgtccagtgtcccaggcgatgcaggatgtcgttggcgttcctgaaatccctcgtactcaagctctcaaacgcatttgggcttacatcaaggaacatgaccttcaagtacttctttctctctttttttactctctctgaaatgctttatgtgctctaatttggttttggttgtggaaattttttaagtctcttgtggtgatttctcattagggtaagttttttggtgtttcagagtagttgtggtttttggtagacaaaagtaaagtgggttgtttgaattgcttatgggtttagatggagagcttctaagaaatggataaggttgtcttgtggtgtcttgttatgcacagttgaatctggagtttctttactgtttagtttagactgaaacaggttcttgtgattagtcgtcatgttacttaccgtatttgtttctttcatgtttgttataataaacttttgaaggattcaacggattgtgagattgaatttggggttttgaacttcttttgatatgactggttaattgcttcaaattattttatcattgttgtgatgataaactttagtggatatgttttggtaatgacttttgatgttctttgatcattgtacttgaccaatgtattacctatgcatttggcattatactagtccctgtgtaatgactctttgtgctgtgtaatggaaacaaatgtagacatgtccatactggggtttgaccttaagacgttagtttgtacttttttctcatgttgtaatctactcttacttgttctgtatagattcttaagtgttcattgtgctaaaatttcaacaaaagaaacattttttatgacaatagtaatgtatatcttttatctatctgtgtggaatttgtgggctaactgaataatgtttcttctcccaggacccacaaaacaagagggatatactctgcgacgagaagctgaagaagatatttgaaggcaaagaacgtgttgggttcttggagattgcaaaactcattggtcctcactttctctgaatgaattttggctgagagaagacaatcattggcctatgttttgctgagctactaaaggccatgaaagatcagattacatattagtaaatttagggtttaagaagtttttatgcaaccaagtagtttataagcctttggaggatatcttatgtcggttatgtgctcatttgctttcccattgcagttaaaatattcctctcttttttttttttttttgtcttaggacttgaaatctctctaatgcatgaagtaatgcttttatcaaatactagtgtttaagaagttttatgcaaccaagtagtgtttttcttttatcaagcaaacttaaacataagaaatctttcataagtcatataaccaaaaggttcttaaaatatcaaaagaaaattgaagtggaacacattacacattaccactcttaattttgttaaaaacgaaattaaaaagggaaatccttttcactattgatttgagacgacatgatgaaaattcagatctccaatccaaattgggaaccgactctctaatccaccctagtctctatatatagagaaccttaaactctaaagagctcacaataacaaaaaccaaaagaagagaagataaagaagagaaagtatcaatatatatatatcaaagaagaagaagtgatgggtctctcagcggcacgcaagctacttgtattcctcatggttactgtgttcctcttctctgggagtgctgacgcgtggagctggagttggggttccggccagtctggttcaaacggggattggggatggagctctggcggttcttttggctcgggttctggtggttcagactccaactcgggtggttcaagctggggttggggatggagctcggacggaacagatacaaactggggttggggaagcagctctggctcaaaccattcaagcggcactggctctacacacaacggtcacagctctggctcgaaccattcaagcggcactggttctacacacaacggtcacagctctggctcgaaccactcaagcagcactggctctacacataacaatcacagctctggctcaaaccactcaagcatagttggttctacacacaagaatcacggctctggctcaaaccactcaagcattgctggtcctacccacaacggtcacagctcgggctcaaaccactcaagcatcattggttctacacacaatcacacggctccatcgctgggaagaaagattgcggttactgtatggaaaaacggatacggttacacagaatggactgcaaagcatgccccattctacgtcaacgatgttcttgttttcacgtacaacaacaatgaccaaacacaatccaagacgaagcaccaccatgacaagaagaagaacgacgtctacttgctcccagacatgaagagcttcaagagatgcaatgtggccagaggcaagaagctggttgcacgaggaggttcatcatcaagaggcttcaagttgcttctccgtaaggttcatacttattacttcgtcagtggagaccacaacgactgcaaccacaacatgaagttctctgtccacccgattccccacccttcttcgcactaactctaaatccacttcacttgttatcttttttcctttcaacttctagtttaatttgttacatattcagattatgatgctctttttcttttattaaacagtccaaatgcattaaccttcggaataaaatatattctgttaatgaaaatataattttttttaagaactagaaaaatgttactagaccaaaaccattattaagaagaaagaaaacagtaataaatcaaaaatctataaaccgccatgtcacaattatttcttacgggcacaacaacgccagaatcttccccttcgttatcgcatatcctcaatattccaaatgatacaatctttaattcaaataaaaacgtgagaacaaattttaattccgaaaaggacgcaaaagaagaagaaaatagagaatgattcgtctccgtttcaatattctccgatcttcacaccgtcgtctcttccaccgtcttcctcgatttttctcctcctcttctgcgccaaccaacggttcctcaggtccttccttgaatctcattaaacctaaactcacaccgtctccgccgccacaccaatcacgaggtcttctccggtcaatttataccgtctcgccttcttcctccttctctaagaaatccgtttttgttctctccgccgccgctttatccaccgctattgcgtattccgctgttatcccttctgatcatgatcaatcaaatcgtagccctagcggaaacagccgtatatacgagtctatcgaggacgctgttcagaaatccggtaattcgttgaggagagtggttcatcatgctagacagaccggtgttgcggtatcggttctgtggcagtcgcttaggtctgtgctctcttcagctaatcatgaggtgcgtgcgggattcgagctgcgtgtggctgctcttttagccgatatagcgtccgcaaatgctgctcgtagagccgctctcgttggagctggcagtggtgcggtggttgattggttactggagacggtggccattcccggcgacagaattggggcacaggacgaagcggctagggctctagcttatcttattgctgatccaacggtgaggaaagacgctctaggaaggcccgatgcagtgcccaagttactgaagttcgtattctcgtgtcaaccaaaaaacaaaaaggtccgttttgcttccactagttgcttgaaatgattaaatttcgagtgattacttgttctcgttattaaatggattagtctggttagatctaatggatagatactagccagctgatatgactctaggtaacatttttggatttagaagaatcaaagcacatatctatgatcagcaagtagttgttgtagaaaaatgagttttgtatatcgctagggttgtttatcatgtgtcaagttgtagatttctctttctcattaacacactagaagctttttgatacatctgattcttgatactgttatgcttctggttgtgttttgccattgatatatagcttttctttgggagcagcattcaagacgtagttcattcgatatttctgattctttgaaaggtaggagcatgcttgtggctgccataatggatatcgtcacttccaactgtgacactatagaaaagacacctttcaagtcatccttgcctggaaatgctacgatgagagatattgctgctgcaattcaagtaattgaggaaggtggtatgtattttgatgagccagaaaaagatgatgacagtgacgatggaagaagtgggattaagggaattggaattaaaatccttgaaggaaccacagttctgggattatcaagaaccagtgggcttgcaccgttgggtgaccttaatgctaatgcgggagaggagactcctaaaacatttgcattgcttagtaaacatgataattcttcacaagctaatttgtcatctgccgtcattcctggcctttgggatgatttacattgtcaacatgtcgcagtgccatttgctgcgtgggcactggcaaactgggcaatggcttctgatacaaatagatctcatattcaagaactcgatcgtgatgggcaagttgtcatgacagctttaatggcaccagagaggactgtgaagtggcatgggagtttggtggctcggctgttgttagaggatctcaagcttccattaagtgattctgtttccgactggagttccagtttacttgccactgtttcacatgccagtaaaactgaggatatctctctggctcaagttgcgttgtctgcctttttagtttctgtcgacagaagtgacaaagcacagaagatggtaatggagaagggtcttcatctgatgagagatagtgctaggaaaacgagaaaacacaaagcagtgcaagaaggtttgtcaaaggctcttgaattactctgtgctggtgacatgcatttatctcttgaagagagtcagaaatggtccggcatactactttcatgggttcttggaaaagttgcatctgatactgttcaatcttcagcaagaagaatcctttcacgcacctttgaagactatggaccacactctgtcccgatatctcagggatggttgacccttataatgaatgagattttgaaccacagtaagacggtgtcagctaaaggagctagcctacctaaaaacgagaaacctaaggttcataaaatttatggtcattgattctgcatctgaacagagaatagatgagaataatgtctattttagtttagttatatctttcaatttatttttgtaacaaaagctattttctttcgcatgcaggtagatcagtccaaagttacttctgctactcagtcaaccaatctgttagcagttgctgttgttaatcttgccatggctcaactgggtacagtcccagagtctgtcaataatgttccactggcagatctgctcctttcagagccttttgcggtaccaattaagaatttaaagaaggatagcccccctaaatttaatgctgctgagtctgcattggcaaccattaaggcaatcaagtcactgacggatgtttgtgctgaagattctgtatgccagaacaaaatagttgattttggtattctttgtttactaaggcgctttctgttaagtgatgattatgagaagctaggtgcaatagaagcttatgatgcatccagagcccttgaggctcgagaccgaactccagatagtcttggtgaatcttcaatcacagatattcaggatccatgtagtgtcagagtcccagctagtgcgcacatccgaaggcatgctgcgagattgctaactattctttcgcttctaccgcaagtccagaaaatcattttagctgatgagacatggtgcaaatggcttgatgattgtgcaaaaggaaatatttcctgttgcaatgaccctaagacacaaagttatgcaagagcttctctgttaaatgtatattgcaatcagcaagatggtagtggatcaggagacggtggcagttccaagccagacatctctaacatgaacagcaactgtcctcgctatggagacatgatatttttaattaatcccggcctaccccattggaagtgtcatgaaaaagaacgtcaaagtggtaagaagaacgaatcctcaagtgaaggtgaaccagcaaatgttactgatacagtcggagaccatgttgttgatgctagcaatctgtctagctccatagatccttccagtagtggttcgcatgtacatgatcctgaatttgatgttatctttcttcatggcttgcgtggtgggccctttaaaacttggcgaattgctgaggataaatcttctaccaaatctggcttggtggagaagattgaccaggaagcaggaaagctgggaacattttggccgagcgagtggctttcaaatgatttccctcaagctcgcttgtttacccttaaatacaaggtatgtctgagttttagcctattttgtatgcatgcttatacctactctatgaggatctttgtaattggttgttcgatcgatttgctgtgtacacatctgttccatgtggcattgatagttgccattttgattctcgttgaaatatttgatacagacaaacctcacggaatggtctggagctagcttgccacttcaggtacagtctttattattaattgtttcaggaaattataccccttttttattcatgtgagtaaaatttctgcggtaattatttaataaatgaaaacacttctacggttaccatatgttaaaccctagttcagatataagcttgctgcagttttaggacctaacaacactatatagtatatatataatcagaggagttaacaaaagagttgaggattgtatctgcacattcgtatattttgagaggtcttggccagtatttgtcagttaaactgtcataattttatatctactgctaagggttaggataatttaccattattatggatttgatgaacaattgttgtcgtttttttcctggaatgtgatcagagtttagtgagtggttattgattacagacagcattccgtttgtgtactctctacttcatctcattatcacttagcctgcagtttcttttgttgatgatggaattttgctaatttgcaggaagttagttctatgatattggaaaagctcgtctcagcaggcattggagaccgacctgttgtttttgtgactcacaggtctgaatctcttatggtgtctgacaatagatatttcccttttgcaaacttatttgtcctgttcagtgattatactggctggtttgttaactgttaaggcttatatatcttggtgtttttctcagtagtgaattacttcattgaatttaaatgtcgtctcctggaacatcaatacataatttttgatcaagtaacgtttatgctgcagtatgggaggtcttgtcgtgaagcagattctacacaaagcaaaggaagaaaaacttgataaactagtcaataacactgctggagttgtatgtatcaacgcatcatgcttatctggttttctgttatcttaatcatcatatttctatatcttcttgagctttgtcttagcgaatcagctatttaaaagttaatgtcactttcaggtattctacagttgcccacattttggcagcaagctagcagatatgccgtggagaatgggtcttgtgttacgcccggctccatctgttagtaaacactattactttattgagctggcttaatcctttaaaccatcaccaaatctctctgtaactaatgagccttatggatgttgaattgtgatagataggagagctacgaagtggttctccaagactagttgagctcaatgacttgcttcgccagctccataagaaaggggttgttgaagtccttagtttctgtgaggttgtggatttattctattacactaatgagtctctttctttagatttgtatcattacatgactctgttcgaataactctgtggtgaatgtttatcctctaattgcagacaaaagtaaccccaatcgtggaaggctatggaggatgggcttttcggatggaaatcgtgccaattgaatcagcatacccaggatttggtgaacttgttgtaagtacctccatttataaaatcccttaataaaggcttaactaaaatttcaaactccaacgctgttggttttacttgaatatatgacacacaggtgttggagtcaacagaccatataaattcatgtaaaccactgagccgctcggatccttcgtatacagaggcgttgcagttcctgcgcaagctcagcgcacagcgattaaaacctcatgttaaacgggaacctgggatacatgattgattaaccatggttaggttaaccgaagatgaaccaaaggtcattggttttggctaattgacgctatagtttttttcatttcttgtgtgtacataacaagaaccacgcttaggctcttttgtttcattttacacattgtttcatctgtattactggattacacaattggaagtaaatataaagattctcaatttcatttgccagtgttcttaaactcgtgatgaataacgaacgatgatgattttaataacaagaaaaagaattaaaaaaataatcacgtgacttgtggaagcaagcaaggcaacgcgttacaaaagcacgtgacgtagcgtattggtggcaatttctcattttttcctcagaatacttactttagagcactaatccaattatcatacgacgcgtgtcccacgtttacttccttctctcatataacaacaaacaacccactccgaattttctggtattattactaatttgccattacgtcgtactgtagtgttttcttaaatttgacgtaagaatgaatgaatgttggaagagtaaaagaaaatgttaataatgtccaacattaatataaactggtttcattttcacatttaccttaagtgatacactgagatcttacatttattaaattttcttcgaacaacaaactatattaattcatagatgatagatcgaactcatatttcatggaatgcttttgcaattttaaaatgaaaaaataaaaagagcatgattaagggtattttggtcaatgtctaagagagatagctgtttccaagacttgttctccaagctggtagtgcaagatctcgttaagtataaaaagggaagctgaggaacacaattttgatacttttgagatacaacgtagaagagaagctctaaggttttcaagttctgctcaacaccactgcttactaattaaggtatccaatgattaatgtgttcatctattttaatcattagttaatcttcttaaccatcatacttccttcaagcaagctctaattattaatgtgttcatctattatgtggttaatgattagtgtgattactacattaaaggcttgcttggtatagtttccattataatccactaaaagagggaaaaagaagaagaaaatggattgaattaaaagtttgttattattttttgggtaaaaaaagggaagcttgtttagcacatttactcagttactcgtccaccaaaatcttttctatgttttattttgggtataatcttgttttcttttcacacaatcacacatcgatttcgggtaacctaagttataatatgtcattgttttgctttctgcacacacttatatatatcagcatatcgctaatcatgcacaaattatacatcacgatttctacccaacaatgacacactcattggaaaaatcccatacgtatgcaaatgtgcatatcttgataagaataatcacattttattgattaaaaatatttcgttgaatagaatgatataggcagatagtttcttcctaagtgtttttttctttggtgtgtctcgttttttgtttgttgcttaatctacatttatactcaacccattagccgcccctatataataacaaacacatatttgcatgaattttaattgtgtgatgccccgttgcttttaatcttgaaactgttagaaattaaagagaatatctagcgagagataacaaaaatatatggctatatgctgcatttttaaatatataaaacaagtcaacacaattaaatacgagacttatcgtgtaagaacttaaataacacacattttcaaataccatttcgggtagggccatatacattttaatcgtcacaattcacatcgtcgtatcgattatcacacgtttgagaagatcagaaaaatacttatactattaactctgtgtgtagattcatgtctaatatagagaaatactcaaatacaaataactaatgagataaggagttgatgactcatcacataatcataactatatattgtctaactccagtgcatggaaaactaaaacagtgcgtaacattttttagccattacattatatatagtttagtgagtaaatacatttttatcaattatatatgtaaatgcaacaatatttcgaagttttttttgtagttctttcataaacaaacaaaaaaattgtagttctttaacaacgaaaaaacagtactttgtagtgtcaatccttagaaagattgtgtgtgtttattttccttcaaagagggatattgtgaatacgttacatattggtgacgcacacaaaaacaaaaacagaaatgtatagaatacgtttaatatcaatttgacacgcacacaaaaacaaaaacagtagattgtgaaaaaagatgatttgttttgtaagtattggcgtaggccaaaaggcggcttaagtagagagtaaacgtttgcttcccgcgttatacaaagccctaattctcatcatcatcatgcgtgcaagctattttccatttcctttaacgattctcattcttactctcttcaagcttcttctttctttccccaatatcttttctcttttatattcattatttttctccctttttctctcccaaatcttttttttttctttttcccggaaaattctctctgttgttgttgttgttgttgtctctctcctgataagctcgaccaagtttatctctttctcgctaatcatttctctttaaacttctctcatcgttgaaccattttgttttagtacataaagattcttcttcattctttttgtacgcgtttctatgttacaaacgcatttctatcataaaagttattattacttgagctcaatcttcattggtttattcatatattcagatcaatcgagttcggtactgcgacgttctaatgggaaaccaaacaagcaaaaagtcacaagagacatcggctaagagcgtgcactacacaacggagctgagatcctacgcggctgcgtgcaaagcagacacggagcttcaatctttcgacacgtgtttgcaagcacggacgagtcacgtgataagcacgctagctacgggggttgaggttcgagcgctctcgttcgattccttgaaagaagtgacgcaatgcttgttggagatgaaccaagaagtggtgaaagtgatattggattgcaagaaagacatttggaagaatcaagaaatgtttgagcttgtcgaagattactttgagaatagcttgaagacacttgatttttgtgctgctttggagaaaggcttgagacgagctcgtgatagtcatcttttgattcttgttgctcttcaacagtttgaagatgagagccttgtccaaggtatgacttttatttctttcttgtttttcatggttttaattagggatgggagttatacccaacaaaataaatttatagggatgggagaaataaagtttcatcttgtcttgttttatgaaaatgcatttttcagttgaaatttctaatttcaaatcctgttttaaaataggagtaatattaatcattagtagtaacgaggcattatatataattcatcctaattatttaattttttgactttaacactcttttttgggttggcaggtgggaacggatacaagaagacacttgaagagctaaagaatttcaaagacgcagagagtcctttcaacgaagacttcttcaaaatgttccaatctgtttacaaacagcagatgctgatgctcgagaagcttcagcatcgtaaaaacaagcttgacaagaagcttaaatgcatccacacatggagaaaactctccagcatcatctttgtggctacctttgccactgtgctcatctgctctgttgtggctgcagccatggcagctcctcctgtggctgcggctctcgctgcagctacagccgtgccgctaggctcaatggggaaatggattgactcgctgtggaagaattatgagaatgcactcaaagggcaaaaagaggtgatcagttcgatgcaggcaggaacatttgtggcggttaaagatttggataatatccgagttttgatcgaacggttggagattgagatcacggggatggtgaagagtgcggagttcgctgtggaacataacgcggtcaagattgggatcgatgatataaagaagaagcttgaggtgtttaagaagaatgttgaagaactggggactcaagcagatttgtgtagcagagatataagaagggcaaggactgtgattcttcagaggatcatcaagcaccctaataatgctagtagtagcacttgaataatgaaatcttgaatagtaaagattctttctgagttaatactatcaatgtttaaataactcgaatctgtttattgtaaatgtatgttgcgttttctgtattctttgatgattgaaactatgggagacaagtcttttcatagttaacttctttctctctaattttcctttttgctgatctctatcaatatgagagtgggctgatatactaaaacgaactcaaaagtagaaaattagatcatgagtttggaatctgaaaactagggaaaatgataggagtcaagctgaaaaaactcaaaatatgtgagttaaaattttaattgataattataaaattttgacaaatatcaatagcttttaaattttgttaatttatgagatatggattgttttagatttttaaaaagatatgactattaatatcaaattaaatattgaaaaataatatggaaaatatcaatagctttgaagttttattatcttaaaaaatctagaattattattgtttttactcttatatttatgtatacataaatcactaattatatattagttatgtggatgcagattacatgagaatagagaaaagctaactctatatatgtgtacaagttttttttctctctgtctctcccaatctgttttcttgtcctgtgttatcgcctctcctggtacgcccgaccaagtttatctttgtctcactgatcgtttctctcagtctcgacctaattgattaaggttttgttttagtctatagattcttctttaatctgtaaacgcatttctatgtttgaaatgcattattatcataagaagtacttgagttcaatctttcattggtttatctgttttattcatatacagaatcgaactcggaactgcgttgtaatgggaaacaaaacaagcagaaagtcaaaggagaaatcgggtaggaactacacaacggaactgagatcgtacgaggctgcatgtaaagaagacatggagattcagtctttcgacacacgtatgcaggcacggacgagtcacgtgataagcacgctagctacaggcgtcgaggttcgatcgctctcgtttgattccctgaaagcagtgattgggagtttactggacatgaaccaagaagtggccaaagtgatcttggattgcaagaaagacatttggaagaatcaagaaatgtttgagttcgtcgaagcttactttgagactagcttgaagacgctcgacttctttaatgctttgaagagaggcctgcaaggagtacaaattaatcaccttttcattcttggtgctgttcagcattttgaagaagagagccttattcaaggcaagacttttcttattttctcttttgttttcttctggttttgactttaacactcatctttttctggttcgcagatgggaacggatacaagaagacacttcaagagctgaagaggttcaaagacgcagacagacctttcgaccaagacttcttcaagatgttccaatctgtttacaaccagcagaagtggatgctcgataagcttcagcgtcgtcaaaacaagctcgacaagaagctcaagcgcattcgcacatggcgaaaactctccagcatcatcttcatggctacctttgccactctggtcatctgctctgttctcgctgcaactatggcggctcctcatgtggctgcggctctcgctgcagctacacccccagtgggatctatggggaaatggatcgactcgctgtggaagaactatgagaatgaaatcaaagggcagacagaggtgttcagttcgatgtatgtagggacatatgtggcggttcaggatttaaataatatcaaggatttgattaaacggttggatactgagatcagggggatggtgaagaatgcggaatatgcgggggagcttggtccagtcaagattgggatcaatgcgattaagacgcagcttgaggtgtttaagaagaacgtagaggaattggagatccaggctgatatgtgtagcaccgatattagaagggcaaggactgtgattctccagaggattattaatgctacttgcagcacctgaagaaagcacaaaaggaactacccggtttctctcatcttcaggttcttgctacaaatgatgaaatgctcaaagacaataaataataatagtacagattctttctgaatgtatatacctatcaaagtccaataactcaaactgtttatgatgattgttgcattttctgtattctttgatgattgaaaacaatgggagacaagactttcacatttgagactatcaaaatgatggttctgccaggagtctatatatactgatatcagagtggtgggctaatagacgaaaaactaaatcataagtatggaatctgaaaactaggggtgttagttaaaggaactgtgataggattcagttctcgtaaactcttaagaggcttgattaacgagagaagtaagtctcttatctatcgcccagtgtccaaagcaaaatcctacattaatccacaaggccccaactcaataacctagctttcctttctaacctcgagctctcaactaattgacataacataatcttaattctgatacagtgatatgtttcacaccccataaacatcacgaagcaaaacacatgtcgaccaaagaaaatatacttacctcagaccacttgacttggtttggaaatatagcaatgatacaagactaaactccttccacactggtccctggctcccactcatgagacatgaaactgaaactaacattaagttatgtaacaagaatctcatgagaaagacatcatatcaattgcctaaaagataggttagaaattctcattctttcagtcacaaaatcataatcataacataggcctgtataaagaaaggttacaaatcacaagattaatagtacgctacacagactgtaatgaatcacttattttacaactgattgaggtctactgggttctccatacactgtctcaaaatgaactccgctcttcttcttttgtcatctctatcctcctcacgcacaaaggatatgggtctatcttcacccttcatctgtagacttagatccaaaggttgtccgagaaatttcttctcggttctgagcttagaaagagcaacaggtttattcttcttccattcagtgtgagcttcactagaaaacccatctcttgcagcctccatagcaggagcaaatgcctctatcactgataagccatctctattcaatgattcgactttctccccggacgatacagaacgcagttcactctcatcatctctcatttcttctttcacaccatccatatctccccacacaggattccttgaggagattttacaaacaagtttcctctgcaaactcaacaaagctctctcagcctttcgtctctgcctcgcttgttcaatcttatctccccttggatctgatactctttcgatccacataggggtttccttataagtatgaggatcaggaaaagctggtagccacaaaggaatatgtttcccaggtggagtttcaccaatttcaacaaagcttgggatcatcttcctactcctatcacttatagctacaggaaaacttggcaatggctgcgagaaagggacttcttcactcgaattaacgaaatcgataatctccctaagtttaatcgaacgacctaatgaacaactctcagacgaaattccttgttcgccattgttatcagtcaaatcatccaaagcgagaatgatatcgaacacgttacactgactcctaccagttagattagcgaaggaagtagcggttttacctagctgaagaatgtactggagtgcgaatccagatagagattcgagagctggatccttgaaattctcgtacccaacgctctcgcagacctgagctactgcagctttagcggctgcgtggctaaactcgtaggactcggagcagccagaggaagatgcggcatcgttcctatcaccttcttgagctctctctgtgttcattgctctaatttgtttcaaaaagctatctaatccctgaaattagggttttctcgtcggtaagaccacatggaccgccggtttaaagagaatcgaagaaatttgcctccgtcaacggaaaagacctaacgtcgacgaagcaccgggaaatatgaagagagaaagagagacagagagaaatgcgtcttgagaatcctgccatctctcgcttatatagagctccaaccccaaaattaactaccaacttttttttttttttttagaccaaaattttggtttaaaattaaacaaatgtaaattgtagtaatcataacccaaaaaattattggaaaattttataagaaattggcgtggctgattttgttgaaaataagtttttctgcggtatttcgtgaaaatttatgaagctattttagaaattcggatgagtgattctgttgaaaatgagttctccgcgatatttcattacattgttttgaaaattttccaaacataacgaaatatcgcgggagaactcttgacaacttcccgagtttcgttacattaaactattttagaaactcttgtggctcgatttgttgaaaatgagttctttcccgataccgcggagattcataacctagttgttttagtgacaacttctcgataatgacagccttacacagtctcaagttctatatcagtctaattgcgattatggtaagaacattaagtggagtaagataacgaggatgttgactttgaattacaaaacctcttacaaaagttataaagacaaatcatacaactacatatattttagtacactcttgacatgacaaatagtatttgaatacgatcacaatgccgaatcaagccagctgcaataactcttcacgtttaatgtcgaacaccttcaccaaagcatcttccacgacctgtaattttttcacaaatattttcactcatgttcgtgtgggaaacaagagaaccaaacaaaaatatagctgcaaatatatatataccttatccggggttgatgcacctgatgtcacaccgattgttattggtccctttgggagaaagttttccttctcgaccagttctccatactatcaatgtaaaatagaaaaaatcagtgaatgcagtttggtaaggagtaagttagttttgaaatgcgcttacgtggagcttataggctattttattcccaggtcctatccgtttctcactatcgatccagtaagatgggattccccgtgcctctgagatttcctgaaggtgagaggtgttacttgaattccatccgccaaccactagcatgaggtcaatcttctcttccactagctcatagattgcgtcttgtcgctcctgaagagattatagtattgatgaataaacacttcctcaagtgtaaaacttgtctagatgcatggtttttgaggtatgggaattttacttgagtagcgtcgcatattgtgttgaagctgatgaaatgtccgcttacattttccactccatacttgcgcatcattgttgtctcgagtaatcttcctgtggggtttttggcatgagactcaaactaaggtgtttttgtttccaaggataaaagacgattgtcatgtaaaaaaacggtagagtaactaacctatctcctctgtttctccctttagcatcgttgtttggtttgcaataccaactttgacaaggtcattgtcgggatcgaaacccttcgaaattgcgtatttgaatttctacaacgccaacatagagattagaaaaaccagaatgatacaaagaattagcaaaataagcttacatacctccatgaactcctcttttgtggagctagatccatcgtattggccaccgagaatgtaatcacaaacgtaatttgcctgtgctcagtaataaggtaccccatcagtaacacatcttgcaaaattctatggatatccaaagtttgacaatataaaagtcacacctctttcatgttctttacaatgatgtactttcctgcaaaagacgcagttgcaatcgtctcttcatgattatatttaccatggattactgatgtgtattcccccttcttgtgcttctcaaccgtgttccagacctttagagtcacaaatgtcaaaaaggaagatatcaataacctatgctagagatgaatgcgagaaacaatattacggatttatggccacaggaggaatgtacctttgtcacccaaggacaagtcgtgtcaacaatttgcacctttttatcattaagaacatacatctcgtcaacaccagctccaaacgcaggaaggataaccacatcatctttctctactacatcaaactgtttctttgaatcctcaaccggaataattttaacatccatatcttccaacctctgcaatgttccatgcaattcaactacactgattggccacaaagcaaaagcatctagctatgtttacagtaaggttactgagtatagtgacgacataccttattgacggtcgggttatgaatgatttcgttagtaatccaaagcctctcctctggaaactgctttcgtgcttcatatgcaatctgaacagcacgctcaacaccccagcaaaaaccatatgctttagcgagtttcacagtaacatctccccaagaataagtatacccatttgttttcagtgtctccaatatatcacctgagcaagataaatcaccatccaattgattcttgttcttcagaacaatatcttataaaccccacaaagatacaacttttcccacttcaatcctgttagatttgccaaaacaatttctaatccaaaacccaatattgcggtcttcacactattcgaaagtctaatccttttttcaacaacaaacccaaatttcgtaaatttcattacagctcaatcaacccaaaacagagcatgcaaatcagcaaagttgggggaacttactggtgtactctcgattcatgagcttgagtgtctcctccttatgaccgaaccctttacgattgtaattatcgcttctcgtcaagttcttacggaacaccttggcgtcgaaatcggagtccatcaccaccgatggcgaaggagcgttctcatcgccagacgagcaccggactgataaagctttccggcggcggagagatccggatccagagagatgattctcccgcacgaaagtatccggtcgaacgcataatcggctgaattggagcgcaacagccatggagagagttcgagagaaacgcacaagcaagcaaaacgatgctgactgttcacttcaatggacgattttggtccacgagttatctcagagcctcttccacatttataataaaaaaaaaaaatagagatgtcaaaaaaaaaaaaaaaaattgaattaatatgtttttggataattgacaaggaaatgtatttgggaattagtgtaaaatgcaacgaaccacttggaattggacatgtgtaattttttatgtcttattttttttatgggatttgatttcatatttggtgagaaaataatgggaagagacatcctactaaaagagcgtacctacgccacaaaaaaaaaaaaattgggtcgcgaaagtgaaagtctcttgaagtcgcaaatttatggttaaactcttttctttaatgatgtgtgattggtgtgaatataagattctgagttgtcaccttgtcaactacacatgtatcatggatattaataaaaattgtaataaaaacaagaatattcatttttgagaatggcatatttttcattgacaataacatacatacatagaaaatgtagtcattggatagggtttttttttttttgtgtgtgcaaatcattggataggttaagtgtcgtacaaaacaaggaaaaatatagaatgaattgataatcgtcacaggcaataagtctgctgatcttaaatgatttggacaaaagtaatccgttaagacgtgaataaaaaaaaaaaacagagacttgtagatgtaagaaaatcacatgggcttaagaaatgcggctgcttttataggcccatatgttataacaaaacaagcccccttaactcttaagctagtttatgccaagatcaagtcaactgttaccaattccataagagttagttaactagtgtgattagtgaaaaggggtttagggtttattggctgagctgataaggaggagaatcgagcaagtccagctatggagaatccaaattccgttggtcctccttctgctttaacctacctcgatcctcactactggtaatcatgaattgcattcagctacaagtagtctccctctctctttcctgtgtttctgaatgtcttggaagaatgcagggacgagagattctcttctgaagaacactatgaatggttcaaggattactctcatttccagcatctcatcatatccaacatcaaaccctcttcttccgtacattccctctctctatctctcttttgttattaatctcttgatgattgcaaaaaaaaaattgatttttgagttttccttgttgttgtaatgaaggtattggaattgggatgtgggaactctcagttgtgtgaagagttgtataaggatgggattgttgatattacctgcattgatttatcttccgtggcggtagagaagatgcagagtcggctgctaccaaaagggtacaaaggtattgcttaagttataatttgtttgagtagttctataggcatgaatgtaatgaagaagaactagagttaacaatgatttctgaattctgattctttaaaactagacactgacaatagtctatatttaattatactgagaagtttattagtttctgctggtttaaagttagatcttacactcgacgtgttcaatatttgatgtgatactttgatatattcagaaataaaagtggtgcaagctgacatgctagacctcccatttgacagcgagtcttttgatgtggttattgagaaagggaccatggtaaaatctgtaactgagctacaactttctttcgatccattgtttgtttaggacttcagatttttcagtgaggttctaaagtatatattttcttgaaaaggagagatagctcatgatttgtccctttttgtaattaatctcgtgttgtaggatgtactgtttgtggatgctggtgatccttggaatccccgtccagaaactgttagcaaagtcatggcaacccttgatggagttcaccgggttttgaaaccagatggcattttcatttccattacttttggccaggtcttcaaacaaaatatctgatctcatgttcttgcattttctcaattaatagctctaaaaaaaaactcttcttttgtcaatgcagccgcatttcaggcgtcctctgtttaaggatcctaagtttacttggtccatggagtacaacacttttggcgatggcttccattatttcttctatatcttaagaaaggtcagcaatgtttctagaatctttgcttaaggattaacatttgttctctgtttcaattaccttatagtagctcttcagcaaatccccacaagttcttagtaacaagtattgcttattgccaaaacaaattgatcttggtttatggaatactaatagctgaatggagagaatcacaaccacatgtatgaaaaatgaatcttaagatctgaaatctgatcctgctatattcaaagttaggcatttctatagaggttgcagtctgtgaacgatttaagcctccatattttctgaaagtgaaccttctcatatattttaactagtgatgatattctgagagtattgaaaactcgacatgtttggtcagggaaagagatgtaatgatgagaaagaagatgagaaatgtaatgatccatcaatatccctatatcaagatgaacttgaaggcgaagactacctcttccgaacacgcattgatgatggcgaggattaggacaagaacaacgtgagattagttgttgttgctctgtaatgttgattgctaattttagaatcattctttgtggattttggacaaaagtaaaggatggcgttgaaccacacctctgcttccgtaccagacagttaacattataacactttaaagagatgtttctatggcgcaggaatcaattagggtaaaaagattaattgatttttgttgttagataaatttcatgtgacatgtatctatatttgaactgaaactgaaagtcatcctaactaacttattcatagtattttacatttttactatctttctttttttgttgccaacagattcaattttagtttgactactactactagtaatatccaaaaaaaaacgaatcttcaaatcaaactctaattggtgattagagtggaaagaaaagaggaattgaatttacgtatgtacaaaaaagaagaaaatatccatcaatgcgcttagtattaaaaaaaactttcacaattatggcaaaaaaaacactttcacattcggaccaaaacgacgacgtaacataaatgtatcgttttgcataaaagcagtaaaagtgagagagagagagagacagataggaatctttgagcgattcgtcttcctcctctatcgccctctactcttcaccggaactgtgatctcaccggaatatccctcctttatttatcctctactcatccgttttactctctccctccgtcgatcttctctttctcttgatcgcctccgtccattctttatcatttcttaattcagaattgtgatcgatggatgattattttagcgcggaggaagaggcttgctattactcctccgatcaagattctttggatggaattgataatgaagagtctgaattgcagcctctgtcctctaaaagatcaaacactcaggttctcttatatacactcttcttcctctcttcattcttctatctctttcttcttaatatccgtgattgtttcatatttggttgttattggtaattctcttccccctcaatttttgtgggttgttgatatttcgtgaaaattttgaaccttttcaaagtgaatttcattgcaattgtgagattgaaaatctggttccggcatcattgttcatctgaatttctcatttttcacagtgtttaggattctaatttattgcagaattgttctgttctgttcttctctgtttgaaattagggtttgttaacagttattctacaattttgcaggtcatcactcaggaatcgcttctagcagcacaggtaaaatcagcagagatgattttactctcgggtttaattttaagctttagtttggtttgagttattggttttctgatgcagagagaagatttgctaagggtgatggaattgttatcaataaaggagcaccatgcacggactcttcttattcattaccagtgggatgtggagaagttgtttgctgtgtttgttgagaaaggaaaagatagcttgttttctggagctggtgtcactgtcttcgattatcaatatggcaactcttcctttcctcagtcttcacagatgagttgtgatgtttgcatggaggatttaccaggtgatcacatgacaagaatggactgtggccattgcttttgcaataattgtgagtaccctcttgctgtaatttgttgcaaaggttgacatatgatgtaacacagttcttgtttcgttttaggttggacggagcattttactgtgcagataaatgaaggtcagagcaaaaggattagatgcatggctcatcaatgtaatgctatttgtgatgaagatattgtcaggagtctagtcagtaaaaagcgtccagatctagctgcgaagtttgatcgttaccttcttgagtcgtacatcgaagataacagaatggtcaagtggtgtcctagcactccgcattgtgggaatgctatacgagctgaggatgacaagttgtgcgaagttgaatgttcttgtggtcttcagttctgtttcagttgtctgtgtcaagcccactccccttgctcttgtttgatgtgggagttatggagaaagaagtgtcgagatgagtctgagacaatcaactggataaccgttcacacaaagctgtgtcccaaatgttacaaacctgtggaaaagaatggtggatgcaatctcgtgaggtgtatttgtgggcagtgtttttggtaagaactcgagccttgtttcctcaatgcttttttttcctattttgcatttgttttttctatgctttgagacgatcaaatgtcaaatggtggaagtgtctctcatgtttggttattaaaatgtacagttggctatgtggtggagctactggaagtgatcacacttataggagtatcgctggtcacagttgtggtcggtaccaagatgacaaagagaagcagatggaaagagcgaagagagatttaaacaggtatacgcattatcatcaccgatacaaagctcatacagattcatcaaagctagaagataaacttagggatactatccatgagaaagtgtcgaaatcagaaaagagggagttgaagcttaaagacttcagctgggtcaccaatggactcgaccggttattcagatcaaggcgagttctttcatattcgtatgcttttgcatattatatgtttggtgaagagatgtttaaagatgagatgacccctgaggagagagagataaagaagaatttgtttgaggatcagcagcaacaacttgaaagtaatgtggagaaactttcgcagttccttgaggagccctttgatgaatttagtaatgataaagttatggcgataaggattcaaatcatcaatttgtctgtcgccgtcgatacactctgcaagaaaatgtacgagtgcattgagaatgacttactcggatctctccaacttggcatccacaacatctcaccttacagatcgaagggaatcgaacaagcagctcagttttatgcttcctggaattccaaagatgctgacaaattccaacctttggatagtggtacaagcggtaatcaactctcggtgaacgatgatcattgtattctagtaacgaatcaatgaatcaaaatcctaatgagtgataaatatttttatacaggagtgacatcgaggcctgagcaagcttcaggatcaaggagctcggaagacaccatttgctcatcttcacagaaacgtcccaaaaaagaaggaagtttcttaaacaacaaagtcactttattggatttgaacttgccagctgatttcgtcgaccagaactgaactcaaatcctctcttgcttagtccaaatgagatatgatgacatagcaaaaggtgtttgactatatatctatcaccttcaagactcgtgactctggactgattaatttgtctttcttatagtttttctggttttcgtacaactataattatgactaccccttacttttgcttctttagttatagatctttaattcagcctctttaaactctgctgcttctcaatgtctatgatgtcaaaagagttattttattagtaactaatttaataactaaaaacatttgtatttaccggtatagcttctagttgttatctcattttctgatttgatcccaagtatagagaagtaacccacaaattgtaataaattacggttaagacaaaagaagtaaagaaactggtctgaacttattatcatgagtttgcgttcgctttttttttttttttgagtaattaagcaaaagaaaggagctttgtgttttgtcattggagtggccaaatatatcaaactttcagaatctgtgctcgttcgtacagtacccatcagatgctacttccagctttttccctctttcaaataaaaataaaactcactgctttctttgcctcaaaaagtatcaggatgataaaatgttggttaaatgttgaattagtattaggatgattacctaaggaaggggattactgcttgataaaaatggttttcttcaacaataagtactttcttttggtataaatggcatctagtcttatatacacatcaccgcaaaaaaaaaattggttttttttttcaagagcccactaaataaaaacaaataattgaattaagtttgcaaaggattatacattattaagttgttaatgctaagatgcaacttatagcaagaacaaaagaacgatttgcaatagtaaacgccaatttaatggagataagtataaatagttagcaattgatagatagtggaatcatgcctaaacaatttgcctaatcttttcaagtggtgtatagtcttcttgatatgtaagtatatgtttaattataattcgttatcaagaatatttgtctggatatatcaagtgttgtggccttgcgggacaaggacaacaaatgctcgacaatattgtacatatataagtatttatctttttaaccaaaccaaaaaaaaatggtattttaggcagtaaagctatgtgaaatgagttatggaggagatttaagtacctttcggcttgcgtgcctaatattccaatgtatctgaactcagatgcattttacaaaggacgttctaattcaatgtaatagagagtacatgtaaagcccacggaaaagaaaacattcgatgcatggatatagtttaggattaatcatagaagcttcctctattaacaaccacgtgtgaagcacccctatcacatatcacaaatgaccaatcttttggatatttcgtgtctgtatatataagtttgcatttataagatcaattctcgcaaccccataaacaattcctcaagagccgttgacaaaccaaaaaacttgttaattaaaagtcaatatttgctctagaccctccaattttccgtaaaaatctccataaaagtctctgtccctccttgccaaccaaaaactacaaacacacatcatccttcgactatcttattcatagctatcaccacccaaaaaagaaatcaccctaatcaaaaaaaaaaaggcaaggagagattttatcattattctattttcatattttttgaaaaaactcaagcaattgacttttgtgataaagatttgaagaaagagatgaggaacgaaacgggtggtaccatggtcgttgatctccaaaccgatccatataacaacattcacagtcgccataatctgagctacgaccttagcgagggtcccaaacctaggcctaaatttggtaatatctcgaaaactgaccacgacgagatattccctcccgacgatcccatcattatcaacagcaacgtgactcaccagcggtttagcagcgtctcggcctcgaccatgagcagcggtccggccagcggagaaggttctccttgcgtaatgtcgccttgggcccgcgtgtcgcctccttggggtgcagatttcaacgaagacaatgtcctcgagaccaacggtctcattggatctattgttagaaaagaagggcatatatactcgctagccgcttctggtgaccttctctacacgggctcggattcgaagaacattagggtttggaagaatttgaaggaacacgctgggtttaaatccagtagtgggctaatcaaggccattgtgatattcggagaccgaatctttaccggccatcaagacgggaagatccggatttggaaggtttcgaagagaaaaccaggaaaacataagcgggttggaacattgccaacatttaaatcaatggtcaagagctccgtcaaccctaagcatttcatggaggtacgccgcaacagaaactctgtgaagacgaagcataacgacgcagtgtctagtcttagcttggacgtggagcttggattgttgtactcgagttcttgggacacgacaatcaaagtgtggagaatcgcggattcaaaatgtttggaatcgatacatgcacacgatgacgcgataaactctgtaatgtccggttttgatgacttggtgttcacgggatccgcagatggtactgttaaagtgtggaaacgtgagttgcaaggcaaaggaacaaaacatacgttagctcaagttttgctcaagcaagaaaatgcggtcacggcgttggccgtaaaatcacaatcttccatcgtatattgcggttcttcggacgggctagtgaactattgggagcgttcaaagcggtcattcacaggcggaatactcaaaggccacaaatccgcagtgctttgtctaggtatagcggggaacttgctgttgagtggttccgccgacaagaacatatgcgtatggaggcgggacccgtctgacaagtcccatcagtgtctctctgttttgacgggacacatggggccggtcaagtgcctagccgtggaggaggaacgggcttgtcatcagggagcaaaagcctcagtggccgagggagaccggaagtggattatatacagcggaagtttggacaagtcggtgaaagtgtggcgcgtgtcggagagaatggccacgtggaaggagatggacgagccagcagcatcttcagagcggaagagctcttcgtctccgcatgaaggaagtggcgcgtggagttcacgcaatgtggaaaaataagagtggaggagcatagtgtgattatttacgagagtgtcacgtcgtcacgagagccatattcacgccgggaaagagacagaggattgatttcatttttatgactaagtcaacggagaggtttgtgccacgctagctggtgtgagaatcaaagtcgggttaatggttttcacgtaatgagttttttggttatttttttctttaaaaaaaatgtttgaaacgaaattgaattatttatttattttccataaatttgtaagataacaagaacaaagaccgaatcaaacatatatatttgttttctttagtggtctatgtcgtggttgcaactttataacttggaattttggatgagtcgttttcctcttcattagaattagtctttctatattattataatataggatgttgatattttttaattgattttccaacctggaaatatccacccaaagttgttagaaattactaatctttgtgaatttactgttaccatttaaacctaatctatctttatgagcaaaaaaaaaaaagtcttattcaatcacttaaccgaaaacatttccacaaccgggatcatcatatatgtctctgcgcctctctttgataaatacttaaatagggtcaacacctccggttttctattaaccgtgtaattcgggttatgcgaacattattgcaggaccgaagatatatttacgaaattgccctctctctttgactccatcaacgcctttcgcaacgcatcgttttcaactcccctaacccgcgttgacggcaagaattttcccggaaaataactcatttttccttttgattgcagagaaaataaaaaacaaagagaaagtcttcccctttttttgtcaagtcctcgtcttttactagtgtatacgatccaacccatctttctgtctttcttctttttgtttacttcttctgcaaattcccttttcccggaaaatttatttgctgatttttcttccttccatcgccactttcctggaaaaaaaaactaaatttcgtctctttctttaagctaaaggagctttctgtgatcaattttttctatatttctgtagttgcgttcttatttcacgcgctttgtgatttgattatttaagccactaatggcttaggatctgtatattatcacttcatgaattctcgttttctcggataagttgttaagtttctaaattagggaattttaggaattagggcttttttgggtttgtatgtgtgcttgattgggtaagaagatggctgcagttataagaaagttattacctttcccatcaccgaatcctaaaagggataatcgagaaagtgacgatgatgatgaaacaagtagtggctatcgaatcgaatattcattcgccagtgagtataaaggtcctcttattgctaatgtgccacgagctcttcccgttgaagttgatcagattcctacggctcttcccgtttccttttcttccttgcggagtggtatctcttacccagtggcacctctcgttatgactaaggataccaagagaccacctgattctggaatagagaagaagaacggtttcgttgactctgcagctggttctagtgtggttttgatagggcgtgatgttgtttctggctcatcatcatcatcatcatcaaagaggttggatgtaccagaagaagtgaaaagtcctgctgattttcggttatcaccatcatcaccattgtctgcatcagcgagagaggaggatcacttagatgatgacagagtttcggatgtgggacctagagcagtgagattcgttgaaccttttcagagtagtgaatgtgatgagagctcctatgtttctgatggagaaagtatagctgcaacgcatagagctgaaaggaaaggtaaaagaggatcgtgttaccggtgccagttggggaaccggtttactgagaaggaagtctgtattgtctgcgatgccaaatactgtttcaactgtgtgcgcagagccatgggtgcgatgcccgaaggaagaaagtgtcaagcttgcattggttataggattgatgagtccaagagagcaagtctcggaaagtgttcaagaatgctcaagcgccatctcacggattctgaacttcgacaagtcatgaatgccgagatcacctgcaaggcgaatcaattgccttcacgacttatcattgtcaatgacaagcctttaagtgaagatgagctttacacgttgcagacatgtccaaatccacccaagaagctaaaacccggacactattggtatgataaggttgctggctactggggaaaggtacagtttcttatatatgtctgcgtatctattatcgggattgtattttgagtgctcagctaaatcagagcctctatgtgtttatttaatcagataggagagaaacctagtcagattataagtcctaacaacagcataggaggatacatcagtgagaaagtaagcaatggagacactgaaatttatattaatggccgggaaataaccaagccagagctcacgatgctcaaggttcttttgcttttcacctttgttttggataacaaatatgcttagtgtatgtgtcattgttctgaactgagcgcttctttgctttgatgtagtgggcgggggtgcaatgtgaaggaaaacctcatttttgggtcgattcagatggttcttaccgagaagaaggtcaaaagcatcccatcgggaacatctggagtaaggtatggtttcctgatcaccagcttttctcgttcacaacattaaatataaaactaaagacaacgaaggatattatttttacagaagagagcaaaaattgcttgcgctgtgttctctctgccagttcctccggcttcgtctgcagtagaaccatatgatgtgcccttatatgagcagaagatgcttaacaagcttcttttgattggtagcgaaaaaggtggcgccactacaatttacaaacaagtgagctattcatcttaatgcctcccacttgaatgtttcacatctagtaaagaatcgggaattgacttcttctgtttcaggcaaggtctctctacaacgtctcattctctttagaagaccgtgaaagaatcaaattcataatccaaacaaatctctatacctatctggcaatggttcttgaggcacatgaaagatttgaaaaagagatgagcaatgaccagtcttcaggtaattattattgactgtacaaactattagaataagaatgcattcatattctaatacaaacatcagttaacaattgattattgaggaagactgatcgagttcttgggatttaggcaatgtgggagatgaaaccagtgcaaaaccaggtaactcgatcaacccgagactaaaacatttttcagattgggttttgaaagaaaaggaagacggaaacctgaagatatttccaccatcaagccgtgagaatgctcaaaccgttgcagatctctggagagtaccagctattcaagccacctacaaaagacttcgcgatacacttcccaggaacgccgtttattttcttgaaagagtaagtttacatcaagttgcctgcttgcatatataaacgctctttcaggaccttaacacttttgtttaaggggaaaaagatgactgacccaaatttgtttcttctcagattcttgagatctcgagatcagaatacgatccttctgatatggacatattgcaagcggaaggactctcctctatggaaggactttcttgtgtggacttctcattcccatcaacttctcaagaagagtctcttgagagcgattatcaacatgatacagacatgaagttagttctgttctttttccttgtgttgcattccggctatatgaaaaaccgttgaacttaccctctctctctctctctctctctctctctctctctctctctctttaggtaccaactcatccggctaaatccgagaagccttggtgaaaactggaaattgctggaaatgtttgaagacgctgacttggtgatattttgtgtctcactaacagactatgcagaaaacatagaagacggtgaggggaatattgtgaacaagatgcttgcaaccaaacagcttttcgagaacatggtgactcacccgagcctagctaacaaaaggtttcttttggttctaaccaaatttgatctcctagaagaaaagatcgaagaggttcctctaagaacctgtgagtggtttgaagacttcaacccattgatcagccagaaccagacgagcagacacaaccctccaatggctcagcgtgctttccattacattggatataagttcaagagactctatgactcaatcttggaacccgtaaatatgcgtggaaggagctttaagccaaaattgtttgtttgtcaagtgagcttggagagtgatactgtggacaatgcactgaggtatgcgagagagattctcaagtggcatgttgaagaaacttccatgttccaagagatgtctactactagcatagaggccagctcgtcctcttgatattttttcctaaaattctttctttctttgtggaaattacataagtttgtttctctctctgtgtgtatgtttgttgtatatgtagtagtgtgaagatacattcatgtgattgatttttcaggggaaaaaaaatagagaaataataaagtgaattttcccggtttaacagacatttacttatacggttattgaggttgaactggaccggagtagcaataaattatcggttcagtttgggagatcaaaccgtttaaaagaaaataatttgaaatggccacgcagaatacgagggtctgaggattgtacctcctttctctgcaaaaacttaaacgttgatttgactcaagcgtcaaggtaaggtactctctcttcatacaacattttagctttactttttctctttactcttctctctctctttctctttctctttctctttcactcgttctctctcactcactctcttcacacacagatccaagatggcctcttcaatggctagcaatgatttccagctccctccacgtttcttcactgttttcgtctcccatttcagctcagagttcatggtaagattttctctcgaggtttcttctttcaggtttatctgttcatgagcaaacgattcttgaactgggtagattctcttagcctagtggtttctttgaactatgtctgatggtttttatgaaacaaacactgtgtttatctgcatttagcttcctctatagattttgctttttctgtttctagggttttgctcttattcctaccctttggtttcctttttctgactaaagatttaaactttctgtatgaatcagcttaatttatggacttaacactggatatgtttggttactggaactaaatttcatcaaagtataaagtagttttgctcagattttgttttctttttctgttgatgaatagaaacatttgttctgcttctaaatgctgaaagatataaaattttgagactggatgctttgattttgtctggttctggaaagttgactcttttaactgtccctacgcttttggttgaaaccaaatcttgttgtgtgtggaaagcctctttaatgactctctccgacttaccttaaagttatcttgttttttttgtgtctttacttatctattgagtgtttggcttataagttaaacaatttttctgtgaaatgagcaggtgatcccagtttcctactacgatcacattccacatcgtttccccaagactgtgattctccgaggacctggtggatgctcctggaaggtagcgacggagataaaggatgatgaagtgcttttttcacaaggatggcccaaatttgttcgggataatactcttaacgatggagactttttgacctttgcctataatggagctcacatattcgaggtcagtatctttcgcggctacgacgcatgtaaagagattagcgaagtcactgaattggaagaggaagaagaagacagtgttatatctctgagcagtgaagacacagacactggtgctaaatctgagatgaagaatacagtcccggaaggcagagacaaaggttcattgttagctttttttcccatcacttgcttttatgtgattttgcttgttttgacttttgagatttttgtttgcaggaaagtcaaaagtggaagttgtggaggattctgatgacgatgaggaggaggatagtgtttattctgaaagcagtgaagaaacagagacagacactgattctgaattcaaggtggccaagccaacaataccaaaaagccagaagaaaggttttaaactcatcgttagctcattgcataacttgaattgtttctttatgtgattgttttatatattgacaatcatgtcttctttgttgagatgttttcaggaaagaagaaagaacaagttgtggagtcctctgatgacgaggaagacgaagaggaggacagtgacagtgattacattgaaacgtttggtcaattggatattgaagagaattccatcagtgaggaggacagttcttatgctcctgataaagaagacacagccactgcctcttttgtcaaaccaaaggttgcaaataaggttgctaatctgaagaggaaaggtaaaatacatttactttcatcacttttaacttcatttcttccatgcttatcttaatgcaacattgctttgtctatggaaccagaggcggcaaagaagaggaagaaaggtaatcacattgttgtcttaattagttccatcacttcattatgtaattgatttttgagatgctaatgcttttgtctcttgagattcttacagtcgatcccatgatcaagaatcctgagagatacctcgatgatcctaagaatatccatttcgagacaaacgtgaagaataggttatacgagctggtaagaactgcaacttcttgtcctcatatactactactctttttaacttaaagattgttttcattaacgttcttgtctgctttgtgtacgtatcttttttacagttggttcatgcacaactggtgaaagactattgcttgaggtttggagactatgttaactacatcgacaggttcgggaaactaagtgctaaaacagccaaatggaaggatcagcgtgtttgtatcaaaagatggatgcgcatatgcaagaggaacaagttgaagaaagaagaccgcattttgtgtgagctcttgcgcaagggaactttcgtttacgcaatcaaactccatgtcatccgcggtaaggatctgtagacgctagcagtatgagtagaggaagagatttggctacttaattatctctctgatttccatcttgttgtgtgatcaagcaaacttatgtgtttcattattgtctacttcagattgtatgaccttctctcttgttctctcatgaatctatttctgaatacaatatctaatctttgagctaaagtttaactcttaaacccttgaaagagtaaaaatccttgaaaaaaaaaaaaaaaaaaaaatccttgaaagagtaaaaatcaaagaaaggtcgaaaactgtatatttgtcttagctttttctttctacaatctgtttttggcaagattttctcttgaaaattctgaagaatctaggtatactggtttccacggaatctcctgtaacaaagatcaaagtagaagaaacagaggactcattcactaaatatataacctttgaggaaaactaaataaaatatgtaccttccttcttcatcctcgtgatatcgcttgttgatttctcttaaatggaagctgcttcaccagaagtgaggagaaacaaagaacaaattagtgagaggaagtgagaaatgaccttgaaagctttgtgacataataattgtgaattttgtgatataaaacagagtagctactctgtttttagtccaaaaatagtaacttccattatcagagtaaaatatactaaccaacataaagtttgattattttgaaaactttgacttggatcattatttattttatagtttaccatgtcgacgttggatatttcttttgtgaattttttggcctacaagtttttttttcaattccagttttgtgggtcctatcgtcacgttttcgaaaacctcttctttttaattgaatgtttgctttcatctttacaaaacagagcaagctactctgtttcgagtccaaaaatagtaacaatcattatcatagtaaacatacaactaaaccaaccctaaagttttattatttttgaaaactctgatttggatcatttgttattttctagttacattaccatgtcgataagggaatgatatttatttcgtgaatttttggccatacttccatttttgtgggtccttactcctttcttgacgttattttttaaaaacctattctcttgaataactttgatttcttctttagcataattctttctttggatatgctccactttttgcacgaaaataatcattttctcctgaagataatcaattttcgcaaattgcatgtcagtgtcactatctttacagagcacgcttttacagactaaaattttgcacataaaatatcttaattttttgttcaaaaaaaaaatatatatcttaatttattatttattttcacatggcgaacatttgtttttttaactcaatgagtttgtatagatgaagtaaacatgaggacaatttaacgaaagttaagtcacctaacgctttgaaatccaacctaccagcctgaatttatatttacaccactttgaataactcatttctgattagagttttttttgtttgtttgttggaaagctgactagttgaaacgttagactctaaatagcttgttaatcaaactggtttcaactatcttctttaaaccactttgattttatagctactaaatttatttacggattatctttaattactttcctcatataattagtttcttaagccaactataaaagaatcaaaaattagaagactaaaaaaaaaaaaattagagtaattaacaacgtgggttattgttaccaaaattaagaaaaatacaagaagtagaaacaaacattaaaatggtccaaaatctgtttaagtagagataatggtgtagaccttaaccagctcaatcccattgttgttatctctttaattactacaatacattttggatagtaatatttcgttatgctaattgcttgtattcgatcgacacctattattacccgatctttatctgaaatggacggttatagactaaaagttgttgagatatttttaattaaaaaaaaaaagttacgttgcagaattatttcataaacaatgaaatacagacattaaaaaagaaaaacgattagagttggtgatcgttattaattaaatatcttgattaatcagtgattagtaccaatccatagaatcttactggttaatagaaagtggaaaaccagttggagaaaagataaagtgaaaaaagtaatgacgcggcgagataatgaagaaaaacgtttgtggtcagcacaaaaaacgtgttcttatcatttcgacacgtgcgtctctctctctgcctttttagtggcttaataagtactacttttcttctggataaaggtattattaggtttataaagctttaacgtcttgtttcattttttgtttttaacttgtataggagcctgccgcccttaatcacatagtcgcatgcattaatacttactacatagtttaataactatttctaagtcaaaatttattctttgaaaaaaacatttaaaaaagaattataaactctttcccaaattttggataatttgttgactttttttgttgttaaaataaattgttgactttattgtcaatgattattgtcaatgtgaccatactcttcttttcttggtggattgaccataatctttttttgataagagtaccaaaattagtaaaaagtttacagaaattataattccgaattgttgagatatatctacgtttttgaatgttgtaatataattagtcataaaactttttactatgattctctttaaattcagttctttttaagtttaatgacaaaatgtgagattttttttgttttcattttcgatgaaccccatatgttttaaaatgaaaaactgctatcctagtaaaagacacgattgtattaaacgttttgaagtaaattttcatacataatccaataacaacagaaattcttcgtctatggatttttgaaagtagatttatagatgatatgttttcttcaaaatcctatataaaaataatcgaagtactacaggatagattagtttgttttgtatgattaaccggtagagttaaatatgtgttttaattggttatgggacaaagtcagaagactaatatggcacgtgacgtgaatagagtctttggaagcgagaatacgtggtgggtcagcgtagagaagggtcaacacagatttatacttttttttgttgtgaattaatccagaagccagctcatcaacatcaacgcttcaacttcaacttctacatccttgaaatatctgagtcctatatcattgagaaacagtcaaaccttctctttcactatgtacctttgacaagttaagctcattttctccttccaccatttatatcccaagaaagatcattttgtctcatattaggtgaattgctcatattgtcttttcttttttaacttggatttaacgggtttataacaaattaataatgatttttttatataggaaaaaaacgttgttgtattatttatttctcttaaaagggactattacattttagcaagatcgaatttccaaggttttaaacttcaaaatgaaaaatattaagcaaagaattagaaacaaaaatcgattcaacgttatgtggaaccataatgcaagattttggtaaaccgtggaatgtctcaccatgtgtacttttttgaaaaaatcccaaaatcaacaattgtgaagagatcttcatgagcttgattcgacgtactagagtatataaaaaggcaaaagataaatttgagacgatggatctagtcatcaagtagaaagacaaattgatctctctattcatgactgtgaaggccattgatgatcaaatagcatgtgaaatcataattttgcacgtgatttatcctaagccaatcagtaagttacctagctacttattccattaaacgtgtttaaatttatatgtaaactgtgttaaaaaggaacaattgataagcgcaatcataataatactaattaaattaacaaaacagtaaaaagaagttcttgaaaatcgtcatgtatgatgaaatgattaatactaaataatgtttaaagaaatgtcatgtcatttaaaccccccaaaaaaaaaacaaagacgtcacattcaaatgtcaaaaaatattcgaggaaataacgcacgtgtttccaaaaacacagatcagaatacgtcccgtgtgaaaagagtgtgtgccagttaggcacgccacgtagatacttgacaaaaacacggagccatataaatagagcttctttctcactttcagtttcccaaacacaaacaaaactcatattttcaatctccaggtgctttacaccaacagagtcgcaagaaaacaaaaaccaaactcggatttagtttgacagaagaaggaatcgagagtcgggtatgcattatcctaacaacagaaccgaattcgtcggagctccagccccaacccggtatcaaaaggagcagttgtcaccggagcaagagctttcagttattgtctctgctttgcaacacgtgatctcaggggaaaacgaaacggcgccgtgtcagggtttttccagtgacagcacagtgataagcgcgggaatgcctcggttggattcagacacttgtcaagtctgtaggatcgaaggatgtctcggctgtaactactttttcgcgccaaatcagagaattgaaaagaatcatcaacaagaagaagagattactagtagtagtaacagaagaagagagagctctcccgtggcgaagaaagcggaaggtggcgggaaaatcaggaagaggaagaacaagaagaatggttacagaggagttaggcaaagaccttggggaaaatttgcagctgagatcagagatcctaaaagagccacacgtgtttggcttggtactttcgaaaccgccgaagatgcggctcgagcttatgatcgagccgcgattggattccgtgggccaagggctaaactcaacttcccctttgtggattacacgtcttcagtttcatctcctgttgctgctgatgatataggagcaaaggcaagtgcaagcgccagtgtgagcgccacagattcagttgaagcagagcaatggaacggaggaggaggggattgcaatatggaggagtggatgaatatgatgatgatgatggattttgggaatggagattcttcagattcaggaaatacaattgctgatatgttccagtgataaatgagctctttcttgttggcgttttttggagttaagtgcaagaagagattgacactgtggcttgtttaaagtgaacaagaacaagaaagcatgtaattagtagtctcattcttttgtttgtggtcaattctatgtttatctcatataaaatctgagttaaacctatctgaggagagagtaaataaagaggttaagaaacccaacattggtctgaattataaacgtaagtgtcaacgttgtttataaaggagaaaactataattggtgacaaaagacataaagaaaagatgtctactcctacaaagcatcgcgtgcagctattcgacaaacaatggcatctcccagagaggaaattccgagctcttggctagttatcttgtaatgctgaaaacatgaatgtatttgagtttatttctgtaacattggaagcgaaataaaagggttatcaactgttaccaaaacattacctttagtatattggcttgatttgcatgtgtcttcaattcctccaaatcaatctccttcccgttgatcaatttcgccacctcctccatctggttttgatctcaaatcatgtcatggttgataaaaaaaaaccactaaaaagagcaacaacatggatagtcagctcttagatggttgaaaagattataacctcaacgggagaagcattgaaccgggcagctagaatgtaagtagtgttctcagaaatcccacatcgtttcaatgattctgtaatctagttgaagaggaaaaacaacattagagaagttgagtgaactgctattcttattacaatttaccaaaccagagaaacttgataaatgagagaatctcaatactcaactaactatctcatcttaaaccaactcacaacagctaaaatctactgcattaaatcaccatctagttatagcagacctgtagctaaggcttgaacaactgaactagacacactaactggtcactagctaactaactgctctctaaccaactcaaaacagctagaatctgatgcattaagtctaatctagttatagtcgacctatagctaagggtggaacaacagaactagacccattgtttatcagaagtagacaggaataggtttaagaaggacaagaaaagattgtacttacgtgcttagatcctgagtaattgtagacaagctcagaatgaagagttctggttgataaggaatcgcgtgatttggagataagtgctttctgagcagcagccaatagaggaaaaatgtctggaatctgatgatacacaacaaaattcgttaagatcaggaactctttagtccttacgaaagttgaaataaatggagtaaacaacaacgaaaaacgtacaagtgatgcattgagaaatgagacctccagcttcagacttccgtcaagcattgaattcaagagctccctgaatacgacataaaccccctaatgttagattcactaggaagataaagagagaggctttagctatgcagagattaagtaaacagattttccctaaacccataagtctctaactaacaaacaaaatcgaaaacgcaattttctttctcatataaccaaatcacgaattgcttaagttatggaaaaagggagagaattgaaaaatcgagagaaggagcgtacttggagttggtgacaccggagaagagggaaacagagagagtgtttccacggtcaagattaaaaaccttcatagctttagccggcggcgaaaaagagggcaagatttttagggttattacgacttattacttcgccggagatcgacacacattcggcgaagtcagaagaagactagtcaaagataaacccttcttctagaagatcttctttctctttcataaaataaaaaaaaataaaagactacattacatacgcgccaggaaggggtcgaaccttcgactttctgcttaggaaacagacgctctatccactgagctacaggcgctctttacgctaccaagtcgctaataacgtagtattagacactaaacaagtctttttaccatttcgattatcatattacgacgtcgaagcagggtattagactatcagtgtgatagtgtgtatgttaaaatctcatcaaaacaaacatcgaaatcggacgtacttcaacattgaatttctgattaaattatcgatgtttgccaaatatcttttgaatagtagacacttaagatttcaagtacccgtaaaaaggatggagtaacatactcaatagaaaactaattaatctattccatccagccatatcccttaagtggaatcaatgatcacaactgcttcgttacaagacaacaccgacattttgactaacgatgttggatttagtgtacgagctatgaaagtggaaaggagcacgaagttcactgaaccttgttctttactattattgtgaatccaagatccgaccttgtacgtcgagcctttgttttcttactttataataatgttttttatgcataaatcatcacaacaagacaaacctttctcagattttgtgaactgcaagagacaacctttgttcactatatgggagaccatagcagagagacatactcacatatttatatattttcttccctttttcttcccattatccatgtgagagattaatgtgatcgatattgcattacttacatcaaattaactaagtttagctttaacaaaaaaaaaaaactaagtttaatatcaagattcatgatttttgtaactcaaaatcagcaatataatttactccttatatattactatataaggttcaatcatataattggtacatgaggttcttaacatttaatttagccaacatgaacctatcaccaagttaattggcaagcttcaaataaaatgaaactccatagtcgagaaaaacaatatagatacaatacaataagaagagtagagttaattaattatatccgttttgtctgcaaaaatgggggttcttggttgttggggtgaagatgaagagcagcgtctgtgtataatttactggcaacggcttgtgggaaaccttgttgcgtgggaactcagattagtagtaattacactgtgcaattacagctatcattgtcacatcatgggtcttttgagatgtgtataaagttttatactactatatattatgaagttaactatttattaattactcagcctccagtttatctgttatatatgtgtttgttcttttcgattatgatttaaacaaatcttgtaaaacctttggagactttggaaagccaacaaattattactatttttttatccccatttctgctagaagcataaaacaactgagtttgggaaatttctcagaaattgcatgctactattttggaaatgcatgtgcatcaaattaaaacgttcatgtgcttaaaacatccctttgcgtcaaattagggtttatcttccaacaattaaatacaggtagtattgtttttgtgatcataaatggctcttcttgacaatcaagagactaagctttaacttttccccgctgttgatcccaaaaatgagctattaagttattattgaagataacttacatatattaagaatctaatcttagatctctatactcaaagagacaacacttatgtctctttgtgtgtgtgtgtgactatcaaacacaataataaatatatatttctattaaattaatataaaagaagaagatatgactccaaaatgtatcatataaatacaaacagtatctctatatatatagagacagcaacaaagacagtagaatacaaaagagagagagatagagatggaatgttcaaacatgaaacagcatcagtaccacggttcatacgcagagccaaggatctcattctcaagcggtttcgcagcgactaagcacgaaatgatcaagtacaaggaggcaccagtgtcgtcagatgattttgagttcggagtcgagaacttctctatgaccacagcagatgaaatattcttcgatggcatgatcttgcctctaaaggaagaagttaacacgacgaagagaatgtcaactctgagggaagaactcagtgaagaagatggtgattcgccgagaagcaaatcaaaaggatcgagtggttggtggagagagagattagggctagcattcgtgaggtccaagaaagatcacaagaaaagttctttttatcaccactagaagcaattcgattcaaccgttctttttattatttttgttgatgttttttggcttcttctctccgtagggctaatttactctgtaatgtgtttctctctgttttcgttttttcttcttcactgttcctctccgatgtaaaaattgtttgcggttgaagagtttcttctttttgtgtttttgatgcttttatttcaggaaaaaataatcacaacataactatcgagtttattttccaacttctcttcacgcgatctttaactagaattcacaaaagcaatctttctacgacactcaagagtattctcaacacttagaaacgtttttttttttttttggcaatttcatttgaacacgtgtagaaattcagatttatttgaccaaatgtcatttcttaaaacatccgtaatccatttagaatttagatcgactaattttcaaggtttaatttagttttaccgtggccatttttttcaattggggcaaataattgatatttataaaattataatgtatatgtttatttatgcagtaaattgattattattaactcaaccaaacgcctagaagagggaaggttacgacgggcccatgaagatgctacaattcatttaaaatctcttgtactgtattcgattttttatggtcattcaagcaatgtagcgtaagagatttccctacactcgtctttagtcaatttttttttgtttaagatggaaatactttaattggcaaatatgtatttttgaccaaagaaaaatttatcaaccttatgtaggtgatatgacgaatagagatatctctatcttagagatagatacaacagaagttactgtattagcaaaatatgtaactaaagatttgggtatacctcttatggcttgttcatatagccatgcatggattaagttaataaataacaaaagagtcgaataatttggaaaacaaaagcataagtcaaagtcaaaccgatgaaaaaggtcatttgtcacacgaattaaataaactcgtattatatataaatatgatttttaaattaaaaaaaaaatagatggagtccagtccatagtgtgaagaatggtgcatgtcagcaaaaacgacatcgtttaagctcgacctgttcgtctcgatgtttacgctttgattagttactatttttctgcaattctgtttcttctctgtacatcaccaacaacatttaaattccaatggcgcattttaaatgtcaataataaatcgagatccgtaatttcgaagctacaagcaaaccttcttgtgcttctctaatcattgcgttttccttttaaagagtttctcaaagttttcccttttttttgggcataaaattgtttccttttcctcctatcagtgtgtctgaaaaaaattcaatgtctttatgttctgttcttttctgatctctctgaatctctctctatcgcgacagccatggccgaagacccttctttcctccccaaggtacctttcgttctgtgttctgtgagtggtgttgatctgattagctgatttgttctctagtttcaatcttagctcttagttatttttttgagttatttcatattcttatactctaaatctataaaacttgattctttcagcattataaaataaaaagattctgagattttcttgattttatatagacgaatctgtggtacccatttgacttaaacaaacaaacaagctaattaacacgaggacatataaatgtattgttttttttttttaatgcaggatggttttgtcttgaagcttcctaaaaagtcatcacttgtattgagaatggtcgttctcctctttgtaatggtctgtgctgtgtacatttgctccatttgtcttaagcaaataggagttagtccaaactatggtttcttgaacgttgaagtgtttgagaggccttgtcctgagcctaacatcgaaccgtgggacattccttttgtgcattaccctaaaccaaagacatataacaggtaaagagagatacaaaaagtttgagcctttatcatgttttgagtctaaaagcttgtattgattagtgcttttgtgggttttgaatgttttagggatgaatgttcttgccacccggttaggtactttgcgattctatcgatgcagagatctggtagtggctggtttgagactttgttaaacaatcatactaacataagctccaacggggagatattttctgtgaaagataggagggctaatgtttccaccattttcgagactcttgacaaagtctataatctagactggttgagtagtgcctctaagaacgagtgcacttccgctgttggcttcaagtggatgcttaatcaggtaaagtgattgttattcacggacactgtgacatatctttagtctttcttactcatatgttttcgactcgtctctgtttccatttgagtgcttgaacaaagagattgctatattccatccttatctgttggtcactgttgcttataactaactacttgtgaatttaaagtgataagatcttgttctgttttctagataagagcagcaacgttttcgttttacaaaagatgtgtgttgagaataggacaatttctcaataatgtgtttgcttttgctatatactttgtaaagttgataaacacgttgcagggattggtcttagagaataggacttcttttcttccctcagtgctcttcacttataagggagtttccgagtcaatgtcatttgaaactaacctgttctatttaggtagcttctttctggttgttgatgttcaaaaaagttgcctgaataaaagtttaggttgaaatagtctgtgatttgatgttggaggaacggaagatagctgatgttcccttcttatttgatccataaacctcggttctatgtagcagtaattgaactgataaatgatcacagttattttatctgatgatgaattattaacattgcagggtctaatgaaacatcatgaagaaatagtagaatacttcaaaacccgaggcgtctctgcgattttcctattcagaaaaaacctattgcgccgcatgatatcagtactcgcaaactcttatgacagagatgctaagctactaaacgggactcacaagtctcacacccattcggccaaagaagctgagatattagcaggttacaaaccaatgatcaacacaacacttttaataaatgagctgagacagattcaagaaatgactttgaaagctttgacttacttcaataccactcgacatatccttgtctactacgaagatgttgtcaagaacctcacggtaattattacatatttttttattgaactagttccagttactgattgtttattatcttatatgtgtttttgaatgaagcagagactagacgatgtacaggagtttctaaaggtaccaaaacgtaagttaaagagtaggcaagtgaagattcatggaggttcattgtcaaaacatgtacagaattgggaagaggtcatgaccacacttaaaggaaccaatttcgaaaatttcttacaccaagaattttaatttttttttgtatatatcagaccaaacaaacccttgtaggaaagttttgtttcacttgccttttttcttttttgctgtttgctgtagggtttggcattaattctcttaaatatgaagaagatttaaacaaaatttcgttgaaaattgtttcttcccctgaagagattttttatctaaatttcttaaaagcagaagaatcacaaaattatagtgaaaccgaaagaaaccagagcgatttagtttgatttattttgttcaattcaacatcaataacaccaaaccggtaaaaaccggaaggctaattcgagattgattgatttaaaccggacaaaaccactcaagccgcgtgaccgagtttccaacacattgcagattccagtcccaaaaagaaaagagagttaaaaatgcaaaaacggtgaaggggaagagaagcgaaattgggggattgggaatagcaacgttttgcaaatggtctcttctttgtagctgcaattgcaaagaacactgagagagagagagagtgtgtgtgtgacctttgagagatggaggaaaaacgacgcgattctgctggaaccctagcttttgctggtagctctggagattctccggcatctgagccgatgccggcgccacggcgacgcggcggaggtttgaaaaggaaagcgaatgctcttgggggttctaatttcttctcttctgcgccgtcgaagaggatgttgacgcgtgagaaggcgatgcttgcttctttttctccggtacataatgggcctttaactagagctcgtcaggcgccgagtattatgccctcggcggcggatggggttaagtcggaggttttgaatgtagcggtgggtgcggatggagagaagcccaaggaggaggaagagaggaataaggcgatccgtgagtgggaggctttggaggctaagatcgaagctgattttgaagcaattagatctcgtgacagtaatgttcatgtggtgcctaatcattgcggttcgttcgttcttcttcttcttcctgtttttggttgagactaaatgcaaaatattgatttcgttttacatttgttactgttttgctttgcaaattttgaaactttatgtggagagactttccaaagtaggcaaagtaaagaactttaggtagtctaggatttatgtatcacttcgtctggaaacaaggagagatttggaattgggtttggttctagaaatcatcatatggcggatcaaagtagaatgtgcatgctcattttatctagtagaatctcattggaaaaaacttaggctatgaactgatgctcctagtccttttcttgtggtaatatgatatctaagttagattttgagttgttggtattgttgatttttcacaacttctcaccctcgcatttatgataaaaaggagttgtttttaatttgggttcctgtacttcaaattctttgaaggttggttttcatgggaaaaaattcacccgcttgaggaacgttcattgccctctttcttcaatggcaagttggagggtcgcacttctgaggtatatagggaaatacggaattggatcatggggaagtttcattccaatccaaacatacaaatagaattaaaagacttaacagaactcgaggttggagactcggaagcaaagcaagaggtgatggagttcttggactactggggcttaatcaatttccacccatttccaccaacagatactggttcaacagcctctgatcatgatgatttaggggataaggagtcactgcttaacagtttatatcgatttcaagtagatgaggcttgccctcctcttgttcacaagcctcgtttcacagcacaagctactccatcagggttgtttcctgatccgatggctgctgatgaattgctgaaacaagagggtccagcggtcgaatatcactgcaattcctgttcagctgattgctctcgcaagcgctaccactgcccgaaacaggtgttttatctctaaactgcatttttttgctagtttctctaatcgtttttttgtaacttatatgctaatattcaaattttgacaggcagattttgacttatgcacggaatgctttaacagtggcaagttcagctcagatatgtcatcttctgattttatactaatggaacctgctgaggcccctggcgttggtagtgggaagtggactgatcaagagactcttcttctccttgaagctttagaaatcttcaaggaaaattggaatgagattgcagagcatgttgctacaaaaacaaaagctcagtgtatgcttcattttcttcaaatgccaatcgaggatgcgtttcttgatcaaattgactacaaagatccaatctcaaaagacactacagatttagctgtgtctaaagatgataattctgtccttaaagatgcacctgaagaggcagagaacaagaaacgtgttgatgaagatgaaactatgaaagaagttccagaaccagaagatggcaatgaagaaaaagtctctcaggaatcttcaaagcctggagatgcgagtgaagaaactaatgaaatggaagcagagcagaaaacacccaagttagagaccgccattgaagaaagatgtaaagatgaggctgacgaaaacattgctctgaaagctcttactgaagcttttgaggatgttggacattcctccacacctgaagcctctttttcctttgctgatttaggaaaccctgtcatgggactggtaagtattttatgtgacacagaaattttgcagtaagggagagattgatctgagattcttcttaatttacaatggcaccctcttccctttctgatcctgcaaggctctttttttctataggcagcctttctagtgagattggcaggatctgatgttgctactgcgtcagctcgggcttccattaaatctcttcacagcaattctgggatgttgcttgccacacgacattgttatattctggaagatccaccagacaacaagaaggatccaactaaatcaaaaaggttttgtaaatatacaataatctctctcaacattctatgtttttattctgctctcaattttttgggagatattggttgttgtttcttaaatctgacactagtaagacagttgcagtgctgatgcagaggggaatgatgataattcccataaagatgatcagccagaagaaaaaagcaaaaaagcagaagaggtctccttaaattcagatgatagggaaatgccagatactgatacaggcaaagaaactcaggattcagtctctgaagaaaagcaacccggttctcgaactgaaaattctactacaaaactagatgctgtgcaagaaaaaagatctagtaagccagttacaactgacaattctgagaaaccagtggatataatatgtccgtcgcaggacaaatgttcagggaaggagcttcaagaacctttgaaggatgggaataagctttctagtgaaaataaagacgcctctcagtcaactgtctcccagtcagctgcagatgcttctcagccagaagcatcaagagatgtggaaatgaaggatactctacagtcagagaaggatcctgaagatgtggtcaaaacagtaggagaaaaggttcaactggctaaggaggagggtgcaaatgatgttcttagtactccagacaagtctgtttcacagcagcccattggatcagcttctgcaccggaaaatggaacagctggttcgctctttctctcactctctgacacattaattactttacctacattgcatgattcttttatatcttatcggtttgttattgaaatgctgtttgcaggtggaaatccaaatatagaaggaaagaaagagaaggatatttgtgaagggacaaaagacaaatataacatcgagaagcttaagcgcgcagccatctctgctatctcagccgcagcagtaaaagcaaagaatcttgcaaagcaagaagaagatcaaatccgacaactttcgggatcattgatagagaagcaggtaagatattgtttttaagtgtaagcagcttagattccgttttgattatgtattgttcagagttgtaacttatgagcggttttttctatgtttaagcagctacataaactagaagcaaagctatctatcttcaatgaagctgaaagcttgacaatgagggtaagagagcaattagaaaggtcaaggcaacggctatatcatgaaagggctcagatcatagcagctcgactaggtgtcccaccttcaatgtcctcaaaagcatcgttaccaacaaacagaatcgctgcaaattttgctaatgtagctcaaaggcctccaatgggcatggcctttccacgcccaccaatgccaaggcccccaggtttccctgttcctggttcttttgtagctgctacaacaatgaccggaagttcagatccatctccaggttcagacaatgtttcttcggtttagtggtcccacattatagtgttaagatttgcagggtagctcttcgtgatgttctctatttataagccaaggtacattatcccaccttttgcggcttcaacctttgagcttggtttcttttctgaagatttatcggaattatgtaggagacggtgatatggggaagttagttaggggttttagacccatcgattaatgtttaatgtaactgtcaaatgaaactttcggagatctgtgaatgtgtttttatggttctttcaactttaatgaattgtaacgttgacgagagatatatgattccgcaaaaggtgggaatgtcttatttttttctttatggattgttgttatacacaaacgcgtacatgtaatgcgtgtccgataataagttttaggttcttgtttcttggacaagatttgcttgtgtcacagttgcaacggtatatcaaactccaaccccaatcacttctggctgtgacttttccttatgtaaccaacgttatgagccaaacattctttctcttatgtcgtttgattactcctgccttttcccgctacttagccacagtatcatggttggattattttctaaaccgatatggtcccaacgtcacaaacttcaaacggcacagatgcaaaagtagtagtaagccaaattagagagactactacggtttcttgagagagcaaatatagatgataaatggtagagaagagacacgctttgtcctaattatagctaaatgaaagtttacatttttgtcagaagaaatctcctcctctttccttaggaagaagctatttctccacgctgtttctacaatttctctctccctttcattttctttctaatcttcttcatcaggtactcatcaatctctccaaattctgggtttccattgcatacgatttgcttcttcacaagtattggttttgcttgggaaacaaggcagttgcgtcgtggatcaccggggagaaggtttctccaccgtttgagaaaccctaataacaacattcaaaatggcggactcaccggtggattcatctcctgcccctgaaacctcaaatgggacaccaccgtcaaacggaacatcgccgtctaatgagtcatcgccgccaacaccaccttcttcaccaccaccatcatcaatatctgctcctccgccagatatctccgcttctttttcaccgccgcctgcaccaccaacgcaagaaacgtcacctcctacatctccgtcctcatcgccgcctgttgtagctaatccgtcaccgcagactccagagaatccttctccacctgcacctgaaggctcaactcctgtaacgccacctgcaccaccacaaacaccgtcgaaccaatcaccggaaagaccaactcctccttctcctggtgccaatgatgaccgaaacagaaccaatggcggaaacaacaacagagacggctccacaccatcaccaccgtcgtcagggaacagaacttccggtgacggtggctcaccttcaccacctcggtcgataagccctcctcagaatagtggagattcagactcatcatcgggtaatcatccacaagccaacattggattgattattggagtccttgtaggagcagggcttttgcttctacttgcagtgtgtatttgcatctgttgcaacaggaagaagaagaagaaatctcctcaggtcaaccacatgcactactacaataacaatccttatggaggagcaccctcaggtaattacagtttagtataactggaatttaatttgtagcctaatggtgtttgattaggtttcagaacgatcatagtctaatggtttctgctagctccatatggcaaaaggattagatttataagctaaaggagatgttgcatagtgtaggtaatggtggttattacaagggaacacctcaagatcatgtggtgaatatggctggtcaaggaggtgggaattggggtccacagcaacctgtgtctggtcctcacagtgatgcttccaacttaaccggtcgaactgctataccgtcacctcaagctgcaactcttggtcacaaccaaagcactttcacatacgatgaactgtccattgcaacagaaggtttcgctcagtcaaatttgctaggacaaggaggatttgggtatgttcataaaggagttctgcctagtggcaaagaagttgcagtgaagagtcttaaacttggaagtggacaaggggaacgcgagtttcaagcagaggttgatatcattagccgtgtccatcatcgtcatctcgtttctcttgttggatattgcatctctggtggtcaaagacttttggtttatgagtttatacctaacaacactcttgaatttcatcttcatggtacattcatctaacagaatgttttcttgtattaacaaaacctttaagtatggtttctctttaatcaggaacatgattgaaatttcaggaaagggtcgtccggttttggattggcctacaagagtgaagattgcattgggatcagctagaggccttgcatatttgcatgaagactgtaagaaaatctttatctcacatatttgcatcagtttctatctcgctctctacaatatttgaaagattgtatatgttacatcaattataggtcaccctcgcattatccacagagatatcaaagctgcaaacattcttcttgatttcagttttgagaccaaggtatgtgtgtatatatcgactcttgtactacttttactttcattgtctctcatttttgtttccaatctgtgtcgatgtgtgtatcagtcttattgtgtaaatatatgcaggtggcagattttggattggctaagctatctcaagacaactatactcatgtctccactcgcgtcatgggaacttttgggtaagcagctttgtaaaatgtctcaactcatccacacttatttagtttctttcacttgtttttaacattttcttggattcagatacttagctccagagtatgcatcaagcggaaagttatccgacaaatctgatgttttctcatttggagtaatgcttcttgagctcataaccggaagacctcctctggatctaactggagaaatggaagatagcttggtagattgggtaagtcggtccccgcctcttcggtttacttgtttaatcccaaaacactttccaaagcaaaaacagaaacaaatcttactattgttgttgcaggcaaggcctttgtgtttgaaagcagctcaagatggagattacaaccaattggctgatccacgtctagagctaaactacagtcatcaagagatggttcaaatggcttcttgtgcagctgcagcaatcagacattcagcaagaagacggcctaagatgagccaggttcaaaaactcataccacttgttggttctattgttatatttttactcacaattaatcttgatgataaatgtgacatactaatgaatcttgaaacatgtgtatggtaaatgaaaagattgtacgagcactagaaggagatatgtcaatggatgatctaagtgagggaacaagaccaggacaaagcacgtacttgagccccgggagcgtgagctcagagtatgacgcaagctcgtacacggcagacatgaaaaagttcaagaaactggcgttagagaataaagaatatcaaagcagtgaatatggtggaacaagtgagtatggcttaaacccttctgcttcaagtagtgaagaaatgaatagaggctcaatgaaacgcaatcctcagctttgaaagaagagacaacacttgtcataatatttcagttttcttctctgtttttctttcattgtttgttcattctgcatcaaagacgtgcagtttttgacagtcacaaaattatgatgtttgtaggagtaatttttgaccaaaagagattagagtgtggttttgttgaaatgtttagtacaaagccttaatccataaatacgtggaatttatcaagattgtttattattggtcttatataattatgagattctaaaagtgtgatacggttagggttaggcgtatccttttgttaccgttgtgataaaatttcctttttgtttctgctactcaaataagaaaaggaaacaatcaaaatttccttttttcattgaacaaacgtgtacttataaatacaccccttctctcttcttccttgagaaaagtctccattctctcttcttcttcctggaaacctaaaccacgtaaggatttgctctgaatctaaatattgacgtggagaagacgcgatcttactaattctccattctctgcttcaacttcaccgtaagattgaacaaacctttacttatatatacctcttctttcttgagaaatccaaattctccattctctcttcttcttccaaaccaaaacctaattctccattctctgcttcaacttcaccgtaagattgatcggttgataaagcggctctttttggtgattgatctctgttgtgactacatcttaggtcaattcagattgctttcatatcaagtctctcctaatttcacaagatcaaagatcccggccatggattcagttgtcgacggcgaaggagaacacaaacgacgactaaggatgcgaaagtgggaaagagggatataacgaagacatggacaatgaaagcaacgagcagtatagaaccaaatcaatggatcatgatctgtgtttggtactaggtgtttccttggcgtcgacgagatcttttgaaaatcttgtgtttcgtcgatatcacaagcaaaggtattttcttttttccttttctatttttaatgattcattttttactaaataaaaatttatttttagatttttttattaagtgttaaaattttcaattttgtgtaaattaatttaaatttttaacacttgtttttgtttttattaaaaactgtttttaaacctatatttttatactactattaaagttttaaggtttttcttattaaatattaaatttttaaattttgtgtaaactaattggatacatcatccaatcccctaagaggtgttctaggttcaatagatggtttacacatcatttaaatttttaacacttgttttttatatttattaaataaatgtttttaaacctaaatttttatactactattaaaatttgaagtttttttttattaagtgttgaatttttaaattttgtgtaaactaattggatacatcatccaaacccctaagaggtgttctaggttcaatatggtttacacattatttaaatttttaacacttgtttttcttatatcaaaaatatgttttaaacctttatttttatactactattaaagttttaagtttttttattaagtgttaaatatttaaatttgtgtaagctaattggatacatcatccaaacccctaaatagtgttctagtttcaatatggtttacacattatttaaagttttaacacttgttttccttatattaaaaaatgttttaaacctatatttttctattactattaagatcttaagttttttttttaattttgtgtaaactaattggataaatcttaactcctaagaggttaggttcaatatggtttacatataatttaatttttcttatattaaaaaatgtttctatttttattttactattaagattttaaatttttttttgttaagtgtaaaaaattaaaattttgtgtaaactaattgaatataacattcaaacctgtaagaggtgtttataggttcaatatgatttatatataatttaaatagtttgctattttgtttagaatcaaaatatttttaaatgacatgttgtaataattgaccaaaagaaattagtgtgtgattttgttgaaatgcagagtacaaagccttaatttataccaagttatggtatctataacgtatatgaataccaaaattttattatttttaattggtgttgtattttataattcgaaataattaggggaacgggcaaaacctctctgttctctcgcttatattttttttagagagaaagcaaatcagtttcaacgatcggatattttctggtgttagccgtcctgactttttgggctttctgtccgatatcaccggctctggtagcggtgttggttggctctagtccggcagcgtcttgttcacataaccggtggttgctggctcttggtttctctcgtcgatgtagatcgatttttaatctgtgtttttttattttcatgttttgtttttaataattctcatctgagacatgttggtgatagagtgaatgcaatctcgctttctaatgcttcttatccgatctgttcttttttaagttttgatttacagaaatttttggagaaatttgagaatgatgttgaagaaaagaagtggattctgttgttaattatcatagccttaagctgttgtatatttaacatgagcctcgattgctttttatcggtgaaaaaacaaaaagatccatgttctatgagactatcgacggtgattctttcaccgaaatcggtgctcagacggcgaaaatgaagtcggttcgctttagagtactcatctgacacgtatattaatatatcgacatgtggtttgggatagagtcaaactatagtttcttcttctatgaaagactctctgttggcctatttggtcctaaatcgtttctgtaatcgcggacttttctttaagctttgactatcttgattaatacaatatttctcttgggacaaaaaaaaaataatcttagtatttctttaatattttttgtttgggtatgggctattgggccgcttcgaaaagttcactttctctatcgatctctcacagtttctgagttctctgactcaaaaacatatagtagaagaaaacgattagagatcttcttctttctcctgttgcatctgaagataaaggaaacagaaagcgcgagatctgagtgacggagtaatttcaaagggaggttttcgagatcagaaatggcgcaacccctcgtgaagaaagacgatgatcacgacgatgagtgtatgtgttctctcttaatctccttataattttcgaatcagctggttttctgcaaaatgtagatccagatgttaagcttctagatctgttatcattcaacagtcgtgattgtgatttggttgtgtagatctacaatctcaagtccgatttagttttgtttaccgcattcgatcccggtgtgaattgctttgcttatttcgatttctgattttttgttggatcagtggagtattctccattcatgggaattgagaaaggagcggttcttcaagaggctagagtctttaatgaccctcaggttgatcctagacgatgctcccaggtcattacgaagcttctttatttgcttaaccaaggggagtcattcaccaaggtcagttaatttttttgcttatactgattcgatgtcatgcttatggagaattgaattattgtgttcttatcctctcgcgatggttgtttgtttcatatgcaggttgaagcaacggaagttttcttttcagttacaaagctttttcaatcaaaagacacgggtttgaggagaatggtctacttgatcattaaggagttatctccatcatctgatgaggtctgtaaattttactcaatttcaatacgaacatcgtcgcacttattgtaggtatattttctgataagttgttggttttttcgcccataggttatcatcgtaacaagctctctgatgaaggatatgaatagtaaaattgatatgtatcgagcaaatgctatccgtgtcctctgccggataatagacggaacccttctcactcagattgagcgatacttgaaacaagccattgtggataagaatcccgttgtttcaagtgcagctttagtcagtgggcttcacttgctcaaggtaccttttacacaccaaaactattaggtagcttcttaattgtaatgttatgcttatattcgtatattgctgttttcagacaaacccagaaattgttaaaagatggagcaatgaagttcaagaaggtattcaatccagatcagcccttgttcagttccatgccctagctttgctccatcaggttagtttgttgcattattatcaccgaagtcgattggtctatgtttctactctttgtttaattaaacagccactgagaagaagtatctcggaaaatgagaggtgttactatgtgtattggactagattcataaataataagttttctgtagcagcatcgtagctctttactacggccttttccagcaattttagtttcttgtgaggtttaatctgtgtctggagtctgtctcagatactgctgattctagcatatgtaactaattaggttggttaggacaacctatttatgtgtctaagatgtacgagttaccaaatgatatgtattgctgctgttacgttgatttaaaatgactcccaacatgatacactctcaatctttgatctaataactgtcaatctttgatcaacttgataatctttcatcatattcagatacgccaaaatgatcgcttggctgttagcaaattggttggtagcttgaccaggggatctgtccgctctcccttggctcagtgtcttttgatacgttacaccagccaggttattcctctcttctgtttgatcatttgataagtggctgattgtatatgtgttatttagctctggtttctaatattcaggttatccgtgacatggccaaccacggtcaatctggagaacgtccgttctatgaatttttggagagttgcctgcgccataaggcagaaatggtgatccttgaggctgccagggcaattactgagcttgatggtgtgacaagccgagaactgactccagcaatcactgttcttcagctctttttgagttcccccagaccagtgttgagatttgccgctgtccggactctgaacaaggtttgcaatgctttcaactgttctctttgtacattgacaccgaaatgatgttttactattctgggtagattcatcattacctttatcatgaggatgaggagatatttcactgtatactaaacacaagtttgaaccacaggttgcaatgactcatcctatggctgtcaccaactgcaacattgatatggagagtttaatctctgatcaaaatagaagcattgctacactcgcaataaccacactattgaaaacagggaacgaatcaagtgtagaacgtttgatgaagcagataactaattttatgtcagatattgctgatgagttcaaaattgtggtcgtggacgcaataagatcgttgtgtgtgaaattcccactgaaatacagatccttgtaagtaaagttttagggtttgttatttgtagttttggtctcgagcatttctatttttttgaatgattaaatatgttatggtatctttttagcatttggcttatgattgatctatcaccttttcatttgtaggatgaccttcttaagcaacattcttagggaagaaggtggatttgagtataaaagagcaatagtagattctattgtgaccattatcagagatattccggatgcaaaggaaagtggactgcttcatctatgtgaattcattgaagattgtgaattcacatatctttcaacacaggtaattattccatcatccatctggggttgctattaaaaacttatgtgttattgaaatgtttattctcgcacagatccttcattttctgggaattgaggggcctaacacctcagatccaagcaagtatatacgatatatatataatcgtgtgcatctagaaaacgccactgtccgggctgctgctgtttccacacttgcaaagtttgggtttatggttgaatccttgaaggtatagtcatcataacaaccattatttttattttccgtttatcttctttgactgatgataatgctcgacagccccggattactgttctattgaagcgttgcatctatgacagtgatgatgaggtgcgttcctagtcttagtctagaaaagcattgctgtttctgtatgtctgtttgttttgagtcgttgcatcatcaaacatgcatgcatgtgtttgcctctgtaaacattttcggatgcatgcaatgcaagttgtttgatgattccttccttgctcatgagtcagacatctttttatcttaaggtccgtgatagggcaacactatatttgagtgttcttggtggtgatggtactgttgacactgataaagagagcaaggatttcctatttggttccctggaggttcctctagtcaacatggaaactagtctgaagaattatgtgagttaatctatttctcggttttctccttttcaatattcttaggacatcagttatcttatatctgggattcctgcaggagccctctgaagaagcttttgatatcaactccgtacctaaggaagttaaatctcagccccttgcagagaagaaagcccagggtaaaaagcccactggtcttggtgcaccaccagctgcacctgcttctggttttgatggctatgaaagacttctctcatccattccagagtttgccgcctttggaaaacttttcaaggttaggggctgatttgtcttctgtgttattctaatgttaatggcttatcttgtttgctttaacttgtactttctttttcagtcttctttacctgtggagctaactgaagcagaaacagaatacgctgtcaatgttgttaagcatatctttgacagtcatgtggtgtttcagtacaactgcactaacacaataccagagcagttgttggagagggtactgaacattggtgtagaatattagtgtcaagcatatcttatctttctttcctcatttaattaatttggcatggggttgtaggtcaatgtcattgtagatgcttcagaagctgaggaattcagtgaagtaacttcaaaggccctaaactcacttccttacgattcacccggtcaagcctttgtggtttttgagaagccagctggggtccctgctgttggaaagttctccaacacattgactttcgttgttaaggaggtacatgttaaataggctattcacttccatctttttatttacttacactgaaaatgaccccataatactttgtggagaactcttataaacaacgactcatttggagaggagtaccagaacgactcaaattaatcacagaaaacaaagaaaactctctaactacattgtttgtgcttttatgaatgtgttaaaacaggttgacccaagcacaggtgaagcagaagatgatggagtagaagatgagtaccagctagaggatcttgaggttgtagctggagattacatggtgaaagtgggtgtctccaatttcaggaatgcgtgggaaagcatggatgaagaagatgagcgtgtagacgaatatggccttggccaaagagagagtttgggagaagctgtaaaggctgtcatggatcttcttggcatgcagacttgtgaggttagtctcttccacttttttctcatactctactgagacttgagggctaaaattattgttgataaagtcttttttgagtatatgaccatttgttgtgttcctgaaattgaaactgacactggataaataacaggggacggagacaattccgctcaatgcaaggtcacacacgtgtctattgtcaggtgtgtacataggcaacgtgaaagtgttagtgagggcacagtttggaatggacagctcaaaggacattgcaatgaagctgacagttagagctgaagacgtttctgtcgccgaggccattcacgagattgttgccagcggctaaaacctcttgcgtttcttcagtatcagagaatgtcatctattcctgctgctaaacctcaaaaatacatcaactattataaatagcatagtattactttctttcttttttccttgcattattactgtcaaatacactatggaggttttctttttattttatgacggtgctttttgatttctcatttctgaattttattattacccgttttctcgccaagttgggaatctacagatcatcttgctcggatttgaaaaccactaccgtaccgtacaacaggctaggctttctccataagttagaaactcaaaaatagtagcgttttatcgtctgcgttcaatatgaagagatgatagtaaagtaaagactggtgggtacacaattgattacagaattc
